(19) United States
(12) Patent Application Publication
(10) Pub. No.: US 2017/0164589 A1
(43) Pub. Date: Jun. 15, 2017

(54) MUTATION FOR TYPE I DIABETES MELLITUS AND ANIMAL MODEL

(71) Applicant: Medizinische Hochschule Hannover, Hannover (DE)

(72) Inventors: Sigurd LENZEN, Hannover (DE); Anne JOERNS, Hannover (DE); Dirk WEDEKIND, Neustadt am Rtibenberge (DE); Tanja ARNDT, Hannover (DE)

(21) Appl. No.: 15/308,969

(22) PCT Filed: May 5, 2015
(86) PCT No.: PCT/EP2015/059805

§ 371 Date: Nov. 4, 2016

(30) Foreign Application Priority Data
May 5, 2014 (EP) 14167082.8
May 9, 2014 (EP) 14167808.6

(51) Int. Cl. A01K 67/027; A61K 49/00

(52) U.S. Cl. CPC A01K 67/0278; A61K 49/0008; A01K 2267/0362; A01K 2227/10; A01K 2217/072

(57) ABSTRACT

The invention relates to a mutation in the Dock8 encoding gene that is causative for type 1 diabetes mellitus at least in the rat (rattus norvegicus) or mouse, the rat or mouse preferably having an MHC predisposing towards type 1 diabetes mellitus and/or a mutation in the von Willebrand factor Vwa2. Embodiments of the invention comprise a process for generating a non-human mammal by genetic manipulation to contain at least heterozygously, preferably homozygously, the mutation causative for type 1 diabetes mellitus, preferably in combination with an MHC predisposing for type 1 diabetes mellitus and/or with a mutation in the von Willebrand factor Vwa2.

[0001] The invention relates to a mutation that is causative for type 1 diabetes mellitus at least in the rat (rattus norvegicus) or mouse, the rat or mouse preferably having an MHC predisposing towards type 1 diabetes mellitus and/or a mutation in the von Willebrand factor Vwa2. Embodiments of the invention comprise a process for generating a non-human mammal by genetic manipulation to introduce in the non-human mammal at least heterozygously, preferably homozygously, the mutation causative for type 1 diabetes mellitus, preferably in combination with an MHC predisposing for type 1 diabetes mellitus and/or with a mutation in the von Willebrand factor Vwa2. Further, the invention relates to a non-human mammal that is genetically manipulated to contain at least heterozygously, preferably homozygously, the mutation causative for type 1 diabetes mellitus, preferably in combination with an MHC predisposing for type 1 diabetes mellitus and/or with a mutation in the von Willebrand factor Vwa2, a process for analysing the activity of a test compound by administration of the test compound to a non-human mammal containing at least heterozygously, preferably homozygously, the mutation causative for type 1 diabetes mellitus, preferably in combination with an MHC predisposing for type 1 diabetes mellitus and/or with a mutation in the von Willebrand factor Vwa2, and relates to a process for analysis of the genetic predisposition of a human being or of a non-human mammal for the genetic predisposition towards type 1 diabetes mellitus by analysing for the presence of the mutation, preferably in combination with analysing for the presence of an MHC predisposing towards type 1 diabetes mellitus and/or for a mutation in the von Willebrand factor Vwa2.

### STATE OF THE ART

[0002] Lenzen et al., Diabetologia 1189-1196 (2001), describe a spontaneous insulin-dependent diabetes mellitus rat strain designated LEW.1AR1/Ztm-iddm, having the MHC haplotype RT1.A^{a} B/D^{u} C^{u}. This rat develops diabetes at 58±2 d at 60% incidence without major sex preference, showing islets heavily infiltrated with B and T lymphocytes, macrophages and NK cells, destroying beta cells through apoptosis.

[0003] WO2005/054512 A2 describes the measurement of a type 1 diabetes mellitus specific gene product, as e.g. the expression of CDC42 among others was found elevated in type 1 diabetes mellitus patients.

[0004] Jörns et al., Diabetes 2041-2052 (2005), describe the immune cell infiltration comprising CD4+ T-cells, CD8+ T-cells and macrophages, and beta cell apoptosis during development of insulin-dependent diabetes mellitus in rat strain LEW.1AR1/Ztm-iddm.

[0005] Yang et al., Science 1398-1402 (2009) describe the activation of Rho GTPases by DOCK exchange factors and involvement of the DHR2 region of DOCK in Cdc42 binding.

### OBJECTIVE OF THE INVENTION

[0006] The objective of the invention is to provide a non-human experimental animal for use as an animal model for research purposes, especially for identification of compounds having activity against type 1 diabetes mellitus, as well as to provide a method for generating such a non-human experimental animal for research purposes. A further object is to provide an analytical process for analysing a human or a non-human mammal for its predisposition towards type 1 diabetes mellitus. A further objective is to provide a process for analysing the activity of a compound, especially against type 1 diabetes.

### DESCRIPTION OF THE INVENTION

[0007] The invention achieves the objectives by the features of the claims and specifically provides a mutant rat Dock8 encoding gene and mutant rat Dock8 protein and a mutant mouse Dock8 protein which in non-human mammals, preferably rodents, especially in rat (e.g. rattus norvegicus) and in mouse (mus musculus), induces insulin-dependent diabetes mellitus (iddm), closely resembling human type 1 diabetes. For the mutation, an autosomal recessive mode of inheritance with an incomplete penetrance of the diabetes phenotype of about 60% was found in the LEW.1AR1-iddm rat. The mutation was found in animals of the rat strain LEW.1AR1-iddm that showed type 1 diabetes (T1D), whereas the wild-type strain LEW.1AR1 is diabetes resistant and did not show this mutation. The mutant strain is designated LEW.1AR1-iddm. Both the wild-type strain LEW.1AR1 and the mutant strain LEW.1AR1-iddm carry the MHC II RT1-B/D^{u} haplotype which is indispensable for T1D in the rat.

[0008] Following linkage analysis on N2 backcross populations of the LEW.1AR1-iddm with the Brown Norway rat (BN) and respectively with the Paris rat (PAR), respectively, analyses of diabetic BN and PAR rats of N2 using SNP (single nucleotide polymorphisms) indicated candidate gene regions. Sequencing of candidate gene regions revealed a mutation in exon 44 of the dedicator of cytokinesis 8 gene (Dock8), resulting in an amino acid exchange from glutamine to glutamate at amino acid position 1864 (Q1864E) of Dock8 protein (SEQ ID NO: 1). The mutation is from the wild-type C to G at position 181980 of the Dock8 encoding sequence Dock8 (SEQ ID NO: 2), corresponding to position 228 622 763 on RNO1 (rattus norvegicus gene 1, RGSC genome assembly version 3.4). In SEQ ID NO: 2, which is based on RGSC genome assembly version 5.0, DHR2 is encoded by nucleotides No. 170118 to 192368, and exon 44 is at nucleotides No. 181971 to 182207.

[0009] The mutation resides in the β4 region of the DHR2 (DOCK homology region 2) of Dock8. The mutation is assumed to change the binding of the DHR2 region to Cdc42, resulting in the T1D phenotype.

[0010] The DHR2 region is at amino acids No. 1620-2070, preferably No. 1632-2070, exon 44 corresponds to amino acids No. 1861-1939, and the β4 region is at amino acids No. 1860-1867, preferably No. 1861-1867 of the rat Dock8 protein SEQ ID NO: 1 (mutated) and of SEQ ID NO: 10 (wild-type), respectively.

[0011] Accordingly, the invention in one embodiment relates to non-human mammals, e.g. rodents, preferably mouse and rat, which contain a mutation in the DHR2 encoding portion of the Dock8 encoding gene (Dock8), especially in the β4 region encoding gene region of DHR2, the mutation changing, e.g. increasing or decreasing, the interactions with Cdc42. Preferably the mutation causes the Q1864E mutation in the Dock8 (SEQ ID NO: 1) encoding region in the rat and the corresponding Q1865E mutation in the Dock8 (SEQ ID NO: 12) encoding region in the mouse.

[0012] In rat, the mutation Q1864E of Dock8 protein causes the infiltration of islets by T-cells with a predominance of CD8+ T-cells over CD4+ T-cells, whereas in the wild-type rat strain without this mutation, well-preserved beta cells were observed.

[0013] Further, the invention relates to a process for generating non-human mammals, e.g. rodents, preferably mouse and rat, by genetic manipulation to contain a mutation in the DHR2 encoding portion of the Dock8 encoding gene, especially in exon 44, preferably in the β4 region encoding gene of DHR2, the mutation changing, e.g. increasing or decreasing, the interactions with Cdc42. Preferably the non-human mammal is a rat or a mouse and the mutation causes the Q1864E mutation in Dock8 in the rat and respectively the Q1865E mutation in Dock8 in the mouse, respectively. In non-human mammals other than rat or mouse, the mutation preferably exchanges the amino acid Q for amino acid E in the site corresponding to position No. 1864 in rat Dock8 or corresponding to position No. 1865 in mouse Dock8, respectively. The amino acid corresponding to position 1864 in rat and 1865 in mouse can be found by sequence alignment, as Dock8 encoding genes have been found to be conserved, and preferably, the position is in the amino acids encoded by exon 44 and/or in the β4 region.

[0014] In a further embodiment, the invention relates to non-human mammals, e.g. rodents, preferably rat and mouse, having a gene encoding a mutation in the DHR2 encoding portion of the Dock8 encoding gene, especially in exon 44, preferably in the β4 region encoding gene of DHR2, the mutation changing, e.g. increasing or decreasing, the interactions with Cdc42. Preferably, the mutation causes the Q1864E mutation in Dock8 in the rat and the Q1865E mutation in Dock8 in the mouse, respectively, preferably homozygously. The non-human mammals can be generated by genetic manipulation introducing the mutation into the Dock8 encoding gene, e.g. by the process for generating non-human mammals by genetic manipulation or can be obtained by selection of mutant animals, e.g. of spontaneous or induced mutant mammals. Preferably these non-human mammals carry an MHC haplotype that is permissive for T1D, e.g. H²G⁷ haplotype in the mouse or RT1-B/D^{u} haplotype in the rat, optionally in combination with a mutation in the von Willebrandt factor Vwa2 encoding gene as described herein.

[0015] As the non-human mammals having such a mutation in the Dock8 encoding gene, preferably homozygously, are predisposed for T1D, the invention also relates to a process for the analysis of a compound with respect to its activity against T1D in the non-human mammal, e.g. a screening method. Generally, in the method, a compound to be tested is administered to the non-human mammal having such a mutation, preferably in combination with an MHC susceptible to T1D, e.g. H²G⁷ haplotype in the mouse or RT1-B/D^{u} haplotype in the rat, and/or in combination with a mutation in Vwa2, e.g. in exon 11 of the Vwa2 encoding gene, preferably causing the mutation R681W in rat Vwa2 or the mutation from R to W in a position corresponding to amino acid position No. 681 in rat Vwa2 protein (SEQ ID NO: 3), corresponding to amino acid position No. 159 in the amino acid sequence section encoded by exon 11 of the Vwa2 gene. The reaction of the non-human mammal to the compound administered is detected, e.g. by analysis of blood levels of glucose prior to and following administration of the compound.

[0016] The amino acid sequences of Dock8 are highly conserved between rat and mouse (98% amino acid identity), and between Dock8 in rat and human DOCK8 (92% amino acid identity).

[0017] Further, the invention relates to a nucleic acid sequence, optionally isolated, the nucleic acid sequence encoding non-human Dock8 or human DOCK8 encoding a mutation in the Dock8 and DOCK8, respectively, encoding gene causing a changed interaction of Dock8 and DOCK8, respectively, with Cdc42, or with human CDC42, respectively, which mutation is in the DHR2 encoding region, especially in exon 44, preferably in the 134 encoding section of the Dock8 and/or DOCK8 encoding gene, the mutation e.g. encoding a mutation of glutamine at an amino acid position corresponding to amino acid position 1864 (Q1864) in rat Dock 8 and human DOCK8, respectively, or at amino acid position 1865 (Q1865) in mouse Dock8, preferably to glutamate (E) resulting in the mutation Q1864E in rat Dock8 or human DOCK8 and Q1865E in mouse Dock8.

[0018] Further, the invention relates to an analytical process of determining in a sample obtained from a human or in a sample obtained from a non-human mammal mutations in the DHR2 encoding section, especially in exon 44, preferably in the β4 encoding section of the Dock8 encoding gene, the mutation e.g. encoding a mutation of glutamine at an amino acid position corresponding to amino acid position 1864 (Q1864) in rat or to amino acid position 1865 (Q1865) in mouse Dock8 (Dock8 mutant Q1865E in SEQ ID NO: 12, Dock8 wild-type in SEQ ID NO: 11) or to amino acid position 1864 in human DOCK8 (wild-type in SEQ ID NO: 8), preferably to glutamate (E) resulting in the mutation Q1864E in rat and respectively human, and Q1865E in mouse. The analytical process can e.g. comprise sequencing the DNA section encoding the non-human Dock8 or the human DOCK8, including the section encoding the amino acids of DHR2, preferably of the β4 region encoding section, preferably exon 44.

[0019] It has further been found that the diabetes-prone rat strain LEW.1AR1-iddm carries an SNP (single nucleotide polymorphism) in exon 11 (amino acids No. 523 . . . 707 in SEQ ID NO: 3) of the von Willebrand factor Vwa2 encoding gene, at position 263216228 of the RGSC Genome Assembly, version 3.4 of RNO, resulting in a change of the amino acid sequence (SEQ ID NO: 3) of Vwa2 from the wild-type arginine (R) to tryptophan (W) at amino acid position 681 (R681W).

[0020] Accordingly, in a preferred embodiment, in the processes and non-human mammals according to the invention, the Vwa2 encoding gene has a sequence causing a mutation R681W in the Vwa2 encoding gene, corresponding to amino acid position 159 of the amino acids encoded by exon 11 of the Vwa2 encoding gene.

[0021] The invention is now described in greater detail with reference to the figures, which show in

[0022] FIG. 1 a schematic drawing of rat Dock8 including the mutation in exon 44,

[0023] FIG. 2 a graphic model of the DHR2 region of mouse Dock8 in the complex with Cdc42,

[0024] FIG. 3 a sequence alignment of amino acid sequences of DOCK8 of human origin (Query) and of rat origin (Sbjct), both wild-type, with the centre line showing the consensus,

[0025] FIG. 4 a schematic drawing of the structure of the gene encoding Vwa2 and the mutation in exon 11,

[0026] FIG. 5 a sequence alignment of amino acid sequences of exon 11 of Vwa2 of rat origin, of mouse origin and of human origin, wild-type each,

[0027] FIG. 6 micrographs of immune cells of pancreas sections from rat with HE staining, and in

[0028] FIG. 7 schematically the cloning strategy in the process of generating a transgenic mouse according to the invention.

[0029] A section of the structure of the gene encoding rat Dock8 is schematically shown in FIG. 1. The gene contains 48 exons, and the mutation that causes a change in the binding of Dock8 to Cdc42 is located in exon 44. For comparison, a section from the nucleotide sequence of exon 44 of the Brown Norway rat (BN, SEQ ID NO: 4), the Paris rat (PAR, SEQ ID NO: 5), the wild-type strain LEW.1AR1 (SEQ ID NO: 6), and the mutant strain LEW.1AR1-iddm (SEQ ID NO: 7) are aligned. This sectional alignment shows that only the T1D phenotypic rat of the invention carries the mutation of C to G, resulting in the change from encoding glutamine (Gln) to glutamate (Glu) at amino acid position 1864 of Dock8 in human (DOCK8) and rat, and respectively at corresponding amino acid position 1865 in mouse Dock8.

[0030] FIG. 2 shows a graphic model of the mouse Q1865E mutated DHR2 region of Dock8 in complex with Cdc42, with Mg²⁺ and GTP bound. The graphic model was prepared using the PyMOL Molecular Graphics System, version 1.5.0.4, Schrodinger LLC using the PDB-code 3VHL. Due to the high homology of the mouse Dock8 protein to the rat Dock8 protein and the mouse Dock8 carrying the mutation encoding Q1865E and the mouse carrying the mutation encoding Q1864E, the graphic model of the mouse Dock8 was used.

[0031] The glutamate residue at position 1865 (Q1865E) of mouse Dock8 is shown as a stick model within the β4 section of the DHR2 region. The enlarged inset shows that according to this model, the mutation at position 1865 to glutamate can result in formation of a salt bridge with the adjacent arginine in position 1797 (R1797), located in β1, and to interact with the serine at position 1849 (S1849), which is part of a flexible loop emerging from the α6 helix. The loop of the α6 helix is critically involved in the interaction with Cdc42, which interaction can be influenced by the stronger interaction of the glutamate residue at position 1865.

[0032] FIG. 3 shows a sequence alignment between the wild-type amino acid sequences of Dock8 from rat (lower row, SEQ ID NO: 10) and human origin (upper row, SEQ ID NO: 8) with the consensus sequence (centre row, SEQ ID NO: 9). Differences in amino acids are marked by shading individual amino acids. The wild-type Q in position 1864 is also marked. The high homology between Dock8 of rat origin and DOCK8 of human origin as well as of mouse origin shows that a non-human mammal carrying the mutation in the DHR2 region, exemplified by the Q1864E mutation in the rat, is a valuable laboratory model representing human T1D. Further, the high homology shows that an analytical process for determining mutations in the DHR2 region in human beings, which mutations affect the interaction of the DHR2 region with Cdc42, especially mutations in the β4 region, e.g. in exon 44, e.g. a Q1864E mutation, is suitable for identifying the genetic predisposition towards T1D, especially combination with MHC RT1-B/D^{u} in the rat, MHC H²G⁷ haplotype in the mouse, and MHC HLA-DR3 or HLA-DR4 in a human respectively, and/or each in combination with a mutation in the von Willebrand factor Vwa2, e.g. in its exon 11, exemplified by the R681W mutation, e.g. in the rat SEQ ID NO: 3. In FIG. 3, α-helix and β-folding sheet regions are indicated below the amino acids, and amino acids forming the a-helix and β-folding sheet regions are underlined.

[0033] The amino acid sequence of mouse Dock8 wild-type is given as SEQ ID NO: 11, the mouse Q1865E mutant Dock8 as SEQ ID NO: 12. In SEQ ID NO: 11 and SEQ ID NO: 12, respectively, the DHR2 region is at amino acids No. 1633-2071, amino acids encoded or corresponding to exon 44 are at No. 1862-1940, and the β4 region is at amino acids No. 1862-1868.

[0034] FIG. 4 shows the structure of the gene encoding Vwa2, including the T of the SNP in exon (ex) 11, resulting in a change of arginine (Arg, R) to tryptophan (Trp, W) at amino acid position 681 (R681W). The amino acid exchange is located in the third Vwa domain of Vwa2. The sectional sequence comparison shows that this mutation is not found in the Brown Norway (BN) but also in the Paris (PAR) and the LEW.1AR1 rats as well as in the mutant LEW.1AR1-iddm rat.

[0035] This mutation of Vwa2 is assumed to contribute to a diabetic T1D phenotype in combination with the mutation of Dock8.

[0036] Accordingly, a mutation in the Vwa2 encoding gene, especially in its third VWA domain, preferably resulting in a tryptophan in amino acid position 681, is preferred in the non-human mammals of the invention and in the processes of the invention for generating non-human mammals and for analysing a sample of mammalian origin, including human origin, in respect of predisposition towards T1D.

[0037] FIG. 5 shows an amino acid alignment of the wild-type Vwa2 amino acids encoded by exon 11 of Vwa2 of rat (SEQ ID NO: 17), of mouse (SEQ ID NO: 18), and of human origin (SEQ ID NO: 19), wild-type each. Amino acids encoded by exon 11 of Vwa2 that differ in mouse or human when compared to the amino acid sequence encoded by rat exon 11 of the Vwa2 gene are indicated by underlining The high degree of sequence identity and especially of the amino acid R in position 159 for each Vwa2 exon 11, corresponding to position 681 in mutant Vwa2 of rat in SEQ ID NO: 3 shows that a Vwa2 having a mutation in amino acid position 159 of exon 11 of Vwa2 also in mouse causes a genetic predisposition for T1D. Accordingly, the process for producing a non-human mammal preferably comprises introducing a mutation in amino acid position 159 in the amino acid sequence encoded by exon 11 of the Vwa2 encoding gene, especially a mutation R159W, and the non-human mammal preferably contains a mutation in amino acid position 159 in the amino acid sequence encoded by exon 11 of Vwa2, especially a mutation R159W in the amino acid sequence encoded by exon 11 of the Vwa2 encoding gene. In rat, the exon 11 of the Vwa2 encoding gene preferably encodes SEQ ID NO: 17 in exon 11, in mouse preferably SEQ ID NO: 18 in exon 11, each with the mutation R159W. The wild-type amino acid sequences of Vwa2 of rat is given as SEQ ID NO: 20 (exon 11 encoding amino acids No. 522-706), of mouse as SEQ ID NO: 21 (exon 11 encoding amino acids No. 522-706), and of human VWA2 as SEQ ID NO: 22 (exon 11 encoding amino acids No. 523-707). In the rat and mouse Vwa2, amino acid position 159 of exon 11 corresponds to amino acid position 681 in SEQ ID NO: 20 and SEQ ID NO: 21, respectively, and to amino acid position 682 in SEQ ID NO: 22 in human VWA2.

[0038] Accordingly, the analytical process for the genetic predisposition for T1D, both in a human sample and in a non-human mammalian sample, preferably comprises determining a mutation in amino acid position 159 encoded by exon 11 of Vwa2, especially determining a mutation R159W in the amino acid sequence encoded by exon 11 of Vwa2.

[0039] FIG. 6 shows micrographs of pancreatic islets with beta cells with haematoxylin (HE) staining from a non-diabetic LEW.1AR1 rat and of a diabetic rat, exemplified by LEW.1AR1-iddm. The micrographs show that the only known genetic difference between these rats, namely the Q1864E mutation of SEQ ID NO: 1, results in the disturbed morphology of the islets in the diabetic rat and in apoptosis of beta cells.

[0040] Accordingly, it is preferred, that the mutation of the DHR2 region of Dock8 causing a changed interaction with Cdc42 in the non-human mammal is homozygous. Further, it is preferred in the analytical process that in the non-human mammal and in the human, respectively, the haplotype is determined in respect of mutations in the Dock8 encoding gene.

[0041] The DNA sequence of the wild-type mouse Dock8 encoding gene is given at SEQ ID NO: 23, based on the mouse chromosome 19 (MMU19, GRCm38 genome assembly), positions 24,999,529-25,202,432, containing the DHR2 region at nucleotides No. 177307-200987, exon 44 at nucleotides No. 188908-189045, and the wild-type C at position No. 188818, which according to the invention is mutated to G to encode the amino acid exchange Q1865E in Dock8 protein.

[0042] Further analysis of pancreatic islets with beta cells from diabetic animals, exemplified by LEW.1AR1-iddm rats in comparison to those form non-diabetic LEW.1AR1-iddm rats by DAB immunohistochemistry with haematoxylin counterstaining with immunostaining for CD4+ (CD4+ T-cells), for CD8+ (CD8+ T-cells), for insulin, and for CD68+(macrophages) shows that CD8+ T-cells and CD68+ macrophages with a smaller number of CD4+ T-cells infiltrate pancreatic islets as well as a severely reduced insulin production in the diabetic rats. The direct comparison between diabetic LEW.1AR1-iddm rats carrying the Q1864E mutation of Dock8 protein and non-diabetic LEW.1AR1 rats which otherwise have the same genetic background shows that a mutation within the DHR2 region of Dock8 protein to change the interaction with Cdc42 causes T1D, at least in the genetic background of MHC II RT1-B/D^{u} haplotype, preferably additionally with a mutation in the von Willebrandt factor Vwa2, especially in exon 11 of Vwa2, encoding e.g. R681W in the Vwa2 protein (SEQ ID NOs: 20, 21, 22), corresponding to R159W in the amino acid sequence section encoded by exon 11 (SEQ ID NOs: 17, 18, 19).

### EXAMPLE

### Transgenic Non-Human Mammal

[0043] A transgenic mouse carrying the Q1865E mutant DOCK8 encoding gene can be generated using targeted mutagenesis in mouse embryonic stem (ES) cells. ES cells of the mouse strain C57B1/6 N Tac were transfected using electroporation with a linearized nucleic acid vector having homologous sections at both the 5′-end and the 3′-end for recombination within the DOCK8 encoding gene, a resistance gene (Puromycin) flanked by frt sites for later removal of the resistance gene. A schematic representation of the mouse genomic locus is shown in FIG. 7a), and of the vector in FIG. 7b), wherein TK designates the selection marker thymidine kinase, LHA designates the 5′ long homology arm, SHA designates the 3′ short homology arm, and numbers indicate exons. The mutation Q1865E to be introduced in exon 44 is contained in the vector. FIG. 7c) shows the integrated vector. The Puromycin resistance gene (PuroR) is flanked by FRT sites is located in intron 43 and allows for in vivo Flp-mediated removal of the selection marker following selection, as shown in FIG. 7d).

[0044] Transfected cells were selected for the resistance carried by the vector and insertion of the vector at the target site was controlled by Southern blotting after restriction of total DNA or by PCR on total DNA spanning the insertion site. Homologous recombinant ES cells were grown on a mitotically inactivated feeder layer of mouse embryonic fibroblasts in ES cell culture medium containing leukemia inhibitory factor and fetal bovine serum for expansion and frozen in liquid nitrogen. Subsequently, the transgenic cells are injected into blastocysts and implanted into a foster mouse. Chimeric offspring are crossed, and the mice that are homozygous for the mutation encoding Dock8 having SEQ ID NO: 12 with the mutation Q1865E are selected.

The application's sequence listing, which the Patent Office published only in electronic form, follows.

SEQUENCE LISTING (23 sequences)

SEQ ID NO: 1 - protein, 2099 aa, Rattus norvegicus
  mutant Dock8
  CHAIN (1620)..(2070): DHR2 region
  CHAIN (1632)..(2070): DHR2 region
  CHAIN (1860)..(1867): SS4 region
  CHAIN (1861)..(1939): amino acids of exon 44
  CHAIN (1861)..(1867): SS4 Region
  SITE (1864)..(1864): Q1864E
MATLPSAERRAFALKINRYSSSEIRKQFTLPPNLGQYHRHSLSTSGFPSLQLPQLYEPVEPVDFEGLVMTHLNSLDAELAQELGDLTDDDLHVAFTPKECRTLQHSLPEEGVELDPHVRDCVQTYIREWLIVNRKNQGSPEFCSFRKTGSRRDFHKTLQKQTFESETLECSEPATQTGPRHRFNVLCDVSGKGPITSCDFDLRSLQPDERLENLLQLSAEDFEKEKEEARKTNRTAELFALYPSVDEEDAVEIRPVPECPKEHLGNRILVKVLTLKFEIEIEPLFASIALYDVKERKKISENFHCDLNSDQFKGFLRAHTPSVDPSSQARSAVFSVTYPSSDIYLVVKIEKVLQQGEIADCAEPYMIIKESDGGKSKEKVEKLKLQAESFCQRLGKYRMPFAWAPISLASFFNVSTLERESTDLEPGAGRNSVGERRSLSQSRRPSERTLSFEENGVGSNFKTTTLATNIFFKQEGDRLSDEDLFKFLADYKRSSSLQRRVKSIPGSLRLEIAPAPDVMNCCLTPEMLPVKPFPENRTRPHKEILEFPIREVYVPHTVYRNLLYVYPQRLNFANKLASARNITIKIQFMCGEDPSNAMPVIFGKSSGPEFLQEVYTAITYHNKSPDFYEEVKIKLPAKLTVNHHLLFTFYHISCQQKQGASGESLLGYSWLPILLNERLQTGSYCLPVALEKLPPNYSIHSAEKVPLQNPPIKWAEGHKGVFNIEVQAVSSVHTQDNHLEKFFTLCHSLESQVTFPIRVLDQKITENTLEHELKLSIICLNSSRLEPLVLFLHLVLDKLFQLSVQPMVIAGQTANFSQFAFESVVAIANSLHNSKDLRKDQHGRNCLLASYVHYVFRLPELHRDAPKSGGPTAVVPDPRYHTYGRTSAAAVSSKLMQARVMSSSNPDLAGTHCAADEEVKNIMSSKIADRNCSRMSYYCSGNSDVPGSTAAPRPVSKKHFHEELALQMVVSTGLVRETVFKYAWFFFELLVKSMAQYVHNLDKRDSFRRTRFSDRFKDDITTIVNVVTSEIAALLVKPQKESEQAEKINISLAFFLYDLLSIMDRGFVFNLIKHYCTQLSAKLNTLPTLISMRLEFLRILCSHEHYLNLNLLFMNPDTAPASPCPSISSQNSSSCSSFQDQKIASMFDLTPEYRQQHFLTGLLFTELAVALDAEGDGISRVQRKAVSAIHSLLSSHDLDPRCLKPEVKVKIAALYLPLVGIILDALPQLYDFTDARSGRSRASGSYEEQDVANGINQNVALAIAGNHFNLKTSGAMLSSLPYKQYNMLNADTTRHLMVCFLWIMKNADQSLIRKWIADLPSMQLNRILDLLFICVSCFEYKGKQSSDKVSNQVLQKSRDVKAKLEEALLRGEGARGEMMRRRIPGTDRFPGLNENLRWRKEQTQWRQANEKLDKTKAELDQEALISGNLATEANLIILDMQENIIQASSSLDCKDSLLGGVLRVLVNSLSCDQSTTYLTHCFATLRALIAKFGDLLFEEEMEQCADLCQRVLHHCSSSMDVTRSQACATLYLLMRFSFGATSNFARVKMQVTMALASLVGKAPDFNEEHLRKSLRTILAYSEEDTAMRATLFPTQVEELLCNLNSILYDTVKMREFQEDPEMLMDLMYRIAKSYQASPDLRLTWLQNMAEKHTKRKCFTEAAMCLVHAAALVAEYLSMLEDHSYLPVGSVSFQNISSNVLEESAVSDDTLSPDEDGVCSGRYFTESGLVGLLEQAAELFSTGGLYETVNEVYKLVIPILEAHRDFRKLTSTHDKLQKAFDNIINKDHKRMFGTYFRVGFYGSKFGDLDEQEFVYKEPAITKLPEISHRLEGFYGQCFGAEFVEVIKDSTPVDKTKLDPNKAYIEITFVEPYFDEYEMKDRVTYFEKNFNLRRFMYTTPFTLEGRPRGELHEQHRRNTVLTTMHAFPYIKTRIRVSQKEEFVLTPIEVAIEDMKKKTLQLAVATHQEPPDAKMLQMVLQGSVGATVNQGPLEVAQVFLAEIPADPKLYRHHNKLRLCFKEFIMRCGEAVEKNRRLITAEQREYQQELKKNYNRLKDSLRPMIERKIPELYKPIFRVDSQKRDSFHRSSFRKCETQLSQGS

SEQ ID NO: 2 - DNA, 194534 bp, Rattus norvegicus
  source (1)..(194534): mol_type="unassigned DNA" note="mutant dock8 gene" organism="Rattus norvegicus"
  unsure (91791)..(91799): any nucleotide
  unsure (91822)..(91898): any nucleotide
  unsure (91916)..(91921): any nucleotide
  unsure (137330)..(137336): any nucleotide
  unsure (137340)..(137373): any nucleotide
  unsure (137375)..(137375): any nucleotide
  unsure (137377)..(137378): any nucleotide
  unsure (137380)..(138487): any nucleotide
  unsure (138489)..(138501): any nucleotide
  unsure (138503)..(138505): any nucleotide
  unsure (138509)..(138509): any nucleotide
  unsure (138511)..(138526): any nucleotide
  unsure (138528)..(138559): any nucleotide
  gene (170118)..(192368): encoding DHR2
  exon (181971)..(182207): exon 44
  variation (181980)..(181980): mutation of wild-type C to G
tttatttttatttttttttccagatttctcctatgtgtcagggctggtctggttaggtttctccttgtgaactcagttgagatatgggtgaatctaaacgctgtgtatagtgtttccccaggttgtaaaaaaaaaaaaaatatgtactcctgggatggagtcattataataaagtgttccataaatgatagtgcgccttcagctggggaacaaaaagttgactggtgtcctaagagactgcccttgaaaaagaaaagttcccaggaatggggtcaacccaccgggaggcccctccagaccccgatggctgcttttggatcccgccctcgctgccccagttgccctccggctccggccgccggcgtttccggccagcgttcccggttcgcgctccgcaaccgccgtgcccgtcggccccgggtcagcggcgggaagcgcgcgccagcggccggcgactctaagcatccggagcgcggttcggcgcagcgtccacgccctcgccgagcgctcggtgcgtgccaggcctggcggcgccgcgggcggcagtgcagagccctcccccggagttgcgcggccaaggtggaaatacggaagtttcctccgcgcggctgacagatgaagctggcgacggacgcgccgggcgctgcagcggctgtgcgttcgggtcccgtccctccgcctccctgcgagccccgaggtcgtggagcggcgcgccggccatggccacgctaccgagcgccgagcgccgcgccttcgcgctcaagatcaacaggtaagacggcacggttcccggccagaccgcggcggggcgcgcgactccccgtggcgacggcggcgagcgcacggggactcagcctcgtcctctgtcacccgtgccgctgctccgagcagcgattcgcatcaccaccccgaccccgcgtggctcccaccgtcctggctgttctgacaggtggccgggctgggagagcgcagcgcgcgccgggttcgcggggccgcgcgcccggacatggcttaataaattgtgtcttccttacagtccggagagagaggggaaagaagctaagtgactgaaatcagctctgctttgaagcagatccgtccgtggtccagggttaggaatctttcaaccccctctttccagaaaacatcttggcttcttctgatggccgcgctatttttataccttggtccaaaaggagccagccatggagtggaaaaaatgatttttaaaaattcttcctttaaataagcaaaagggaatgagctgtagttgaggtttatagcgcaccagcaaagcgaaggacacagggacttccaatttataatcagagttgcacatctctgtgagtggatcgctcacaaagttctcagttgatttgaccggcagtgtttcctccactgaaaactgctgacaagtattcagggggcattttgccttgacctgggaaatctagactgcctggctaactggctaaatgataatgtggaagggcagcgcagcgctctggaggatttccagggttggtgttttttttttttttttttttttaaagcctgtgggaggctggtctttgagctgctagtgagtgaagcttgagtcacaaggactcaccatcctagaatagtgagcagtaaggacttcagagggcctatagaacttcaccgcgtagttgtgaacaagatttttcacgcccttaactgtttcacctgtcaaattagtttaattattaatgtggactgtatacaaatgctaaagggtgcgactgaaaagtcattaattatatcataattcatactcttcctctttctgtcctccggcttttgtggctgtggtggggcagtaagggcttaggagtttttgatggctgtcatcgttgcctagctgcttctcctcactttgtccccaccatgagaaagatacaagccaggaaacaaggaacaagggcagggagaggttagggattcaggaggggtgatactgatctgaagtgactgtccggcaccacacaagcctggaggtactcttgcaaggagctatggcgatggtataacccaagggtcaaggattaaggcccttagccagatgtggtggacttgcctataattccagtccttgggaggctgagagaagaggatcacaagctgagtgccaatcgaggctgcatacagagaaacaaaacagaagcagccatcaaagcaaaacagtgtgagaggagacagagtgcctccagaataaatgctaaatagctgttagctgacatgtcagtaccgttgacttcaccgtggtcattgtcgtctctaatattatcaaatctgagatgatactagggaccctaagaagacaaagtacaaagggcagctgaagttggagtattttccaggcagaggccatttggggctgggtatggggatgccagtggccacctgcagctttcttgggggttacgtctctcacgtgtgtaaccctgtgctgagaatgccagacatactcattggagcagaatgttccaagaagtacccacttaggaaagtaaaatatgttttctaaccttctggaaagagtgtaaatggtacttttctttttaaaaaagagtcccccaccccttgaagccactttgtgtattgggtgcaagaattacgctaagggcttgtcaggaataactttcagaagagtaagaatgtacttagtgtggatgttacgttaaaactgaatactgactttcagatgtgctgtcactcaggacactcagtcgccctggacagaagatgcggtcagctttaattgtccacttgacacaatccagagtcacctctgggaagagagtcaaaactgatgggtagtctacatcaggtttgcctgtgggcatgtctctgttagatgctctttgttgttgaggaagacgtagccctgtgtgggcaatgcctaagcttcgtaagagtgaagaaagccgacttgagcaagccagggtgtgcatatgtgccttggtcgtggatacggttagctgctcgaatccctgctctgacttccccaaaatgatgggttatgacatgaaattgtaaaccaaataaactctttcctcccctaaactggagctgtgttaccctggaaagagaagcgaaactagaaagaaggggaaagtgaagctggagagtagttgcacaaggctgtgtgatttgtaaaggccatagtcaccaaaggcagccaggactacagatggctcttacattggccttctgcattaggcctatgctattttgatctactggttttaaggatttcctttaaaagcaaagaattaactttaaaaaagaagtcacttcagtaacagcattgacagttctgcttctgagcaggacctagtacgtaaacaaggtgctattctgcaatgtcaaacatggagcaatcttttaccttacatgtgtgtctattggtttttgaaatagatcagattccaaaagtaagactgtgtttaggacttttagtacactttcgtatcttcatcattctgtttaacaatgatattccttaagataattcattttcctattaatgtaatattgtaatctgacctgcaattacagttgcaaagagctcagctctgggccccagcctcaaccaggaataagcagtgtcttacatacagtcagtgaaaaaaatgttccccactgcatgcaaatttctgtggcttcctgcaagcagcattgcccagtgcagggccagcgccaaagtcagaggaagtcgtaaatgctggcagcagctgtctccccatgattgttctggctctctcttctgctctcataactgtatactcccatgctagaaatcatcaggtaggacagctaggagcatctagtgtaactgtatctcccgttgtcctgttggatggatactttgaaacatttctctagaacccatagctcagggagatagaagacaagactctaccactgaattgttctgagttggaatgtctggtaggttatatgcacttgtcttgattttagtttttccctgattgtggtgaggaagaaagactagatgtgaactgggtgatcacaatgtttgtgttcgcgattttaggaactgctgtatcaggtgtatcatcgtccttcaaggagcatttccttgttgatgagctctttgatgactggaatttgctgcttttgcagatgctgggaattatttctaatggtgcaaagattctcgatttctttttttctttttatacagtgttgggtattaaacctagggccgtaagcatgctaggcaaatgttttagcactgagctgtatctcagcccacatgtttctgccaaacagaataggtacagaacttgatcaactgtgagagtaaaacaagagctttagataaataaagggaatgcatcaaccattgtggaggcattagtgactctctggacacccaggattgaaatacatagaccataagactgacacttttatattacttactctattagttaacttctctgtggctgtgacaaaatatcaagacccaaagcaacttacatccagaaggaagaatttaattcggcttatggttccagagtgagagtccataatggggggagggggtgggggaggcatggcaacaagctatcagggcaggaagccgagaggtcacacgctccaaacagaaacaacaatctagaagtggggcaagactgtaagctttcaagcttgccccaagtgataagcttcctacagctagtttacactacctccctaacagaggatcaagtgttcaaatacttaagcttacggggagcatttctcattcaaactaccatacttactatgcagcagatatggacccaaatgtttatatcataactcactcacttctatgaattaggaacaattgctgtcttcatttataagtggggaacggaacccaggcaagttatgcacgttttgattttatttcacacagctaattaaggtcagaactgggatttacattcaggcagtctgtcgccagcatcctgccctcttactcactatatcatgctgtgtcttggttttgttttaaaataaagaagtaacgatatttactatctattaagtattgtgtcagacagccaagattccggcactggtgagggaggtgctgcctggtccccatcccttaatgaggagatagtggcagctgatagctactggagcagggaaaatcattctcttttgaggttgtttcccatacactagtgggtgaccccacacccatgtacatgtgggcagcgctaattggatttagtgcaattaaaaaagaaaggcatgaaatgggaggggggacatgttgaggggatatggggagagttggaggcgggaaatgaatggatatgatcatattttattgtatgtatgtgtaaaattctcacaaagaaaattataataaagaaatgagagcagttgaaaatgcttgttattgatttgatgagtgtaaattgtacatatattgaaataccacattgtactcaatagatcagtagttattatttgttaataattcaactaaaacaattaaaaattaagatttttctaaaaagagaaagacatgccaatcagatgacgtagctggtaaaagtgcttgtctgacaaatgtaggaaccaacccccaatggagggtcagaactgattccccaaggtcatcttctgacctttatacattcatcatagacatgcacctgcattcacatacgcacgcacacacacacacacacacacacacacacacacacacacacacaccatgcaacatgataatcatacaattaaaaaatataaaggtagaataaaacataaggcataccactcatcattaggatgactttttttttttatagaagataaagacaggtgctaagaaagaataaagttgggctggagagatgatggctcagtggttaggagcactggttgctcctccagaggtcctgagttcaattcccagcaaccacatgatggttcacaaccatctctaatgggatctgatgccctcttttggtgtgtctgaaacagtgtactcatatacattaaataaatagatcttttataaaaaaagaaagaataaagttacataaaggtttaattcaagaatgaccccaaggtaccaaaaacctgtatttaaagctatttgggaggctgaggcaggaggatcacaagaccaaatttagcctctgcagcttggaccctgtctcagaataaaatgtaaaaggggggctgggggtatggctctttggcagagcacctgtccggcatgtaccaagcccagagagagacagagatagagctagagatagacacagagagagagacagacagagaggcagacagacagggacagagggaggtgggatggggagacagctcagtggtaaaggatcctgctatacaagcccaatgacttgcatttgatgccgagagcccacatggaggtggaaggatagtactgactccataaagttgtcctctggtgtcatgcctgcatcctcacccacacatacatatacacaataataatattcaataaaacaaagtttaaagaaaaacaacgactcagggctggagaactactcagcggttatcagcaaggacctgtctggcagaggactcctcacatgcatctgtgaaggctggtttacttccctataggctagcggagaggagacacagcatcctgtgcctccccagggagagaggcagagctcagagacaagggctcctgtcttagctctccacacagagctagagaagagctaggatgatgtcacaaaccccctggtttgcatcttttttaacaggagcatgaaaaggcaggaggtaactctactggtcttgctggaggacccttaagaagcagggccatttgagtcttttccatagcaaagttacttaataatatctcaaagaattttaataaaggttgaagcaagagaaatatcctattcctggccccatacgcatccaagcttatatatagcccaggctggctttgaactcatgatgatctctatgcttcatctacccatgtgcttggattacaagcatacatggctatagccagcttccaggtctctattctcacagtatagattcatcattgcaaagagctcacatgtatgcatgcatgcacatgggacccaagtgcaactcaatgaagtaataccttggggagcagaaaggagaacagaaattataagcagaacagaagacactgtgtgagcatctgcacaagctgtgcatgaagaacagaggacaacttttgggagtcagttctcatcttccctgctcaggcaggctctcttatttctgccagagtgtatggtaggctagctggttcattagcttctcccgtgtccacctcccatctcaccacacagtaagagtgctgcgacaacagatgtgcaccactccatcgagcttttcccttgggttgcagacattttgctgaactcggatgatcaggcttgtgcaagcaagtgcttttacctgccgagccatctccctgacccacattcccttgtaaaattcaaaaccatctcaatcaaaagtacagtaaagtaaaagtgcaaagtatagtaagcaaaaaggggaaaagcacccacatttcgaccactcataaattagtaatacctgttaacatttggacacacttccttctaatttttcaaaaacaaaattgtcttgtgcatgctacattgtaatttttaatatgtgttgacaaccctccaagtcaattaacatgggcctatgttataaataatgtgaaagtattatggtttactaaagtagttattatttgggcgtcaaggtaattcccagttttgcaaaataaatgttagagcttgaggaaacagtctgaagcatgttttctgtgcttctgcaaatacccctgtatgcatttctagtagtagaattatttgtttaaaaaaattaaggttctttttagtttggcttttgtgtgtgtgcgtgaatgtatgcatgtgtgttcagtgtatgtctgtgtactcacccatatattcatgcagcagccagaaggacatttggtacgctgtcggttctcggtttgggttaggctggctgtctagctgggcttacaggagcatgcagtcatgccgagctttttacctatgtggatggcatccctgctcaggtctttatggccttacccagctttcgttcttcatgtttttatcatgttcacttctgggacaggcacatcactttctgctcctgcccctggctctgcaaatgctcatttccttgcattcaaatcccactctcccccaaccatttactatttatttaaaattcatcattctttaaagtgtttgtttgttcatttttgactccttgcctttttttttttttcttcttttttctttttttcggagctggggactgaacccagggccttgcacttgctaggcaagtgctctaccactgagctaaatccccaaccccgactccttgccttttttaagccatgaaaacagtcgtgtatgtcttccttttgcctcaactgcaaccagagatgatgctcactgttcctgggtttccttcctatcaccttattccttgaataatggtttgtttgcttgtttttgttttttctttgtgtaacagtttaattcagtcaaggcctctttgagtatataccaacctttttaaataaaattctatcacaaagtaagatttcaaatcacatgatggattatgttttcctggggatgagtgaatagaaaatgtgagatttttttttcatgtttttgtgtgccttttcctgtggagttggaatttgggacaaaacatgtctctctgcttagaaacctcgcaaagcttcctggcttcctctctgattgttctctcgaaacacaggtaaaacttactgtagcccaactacaactagagtaagaaatgcagaactgtaatcaaccccaatctcttcctccctccttttcttttgttgattttgcatatgtatgtgtgatgaatatgaacatgcatatgaacatgttgtgttcacatgtgtgtgggtacatgtgtatatgtatgtgtgtgaatggatgtgcactgtgtgtggagtctgcgttgacctcaggtgtcaaccttccttggtcacgttctctcactaaaccccaaacatgtcattttagctagccttgtgtattagtcaggttctctagagtcacagaacttatgcaatgtctttctgtattgagggaatttatcatgatgacttacagtctgtagtccgactccccagcagtggtcagctgtgaacgggaagtccaagaacctaggagttgctcagtcccacaaggctggttcacctggtcttctatagaagtggattccaatagatgtgcgggcaagtaaatgcaagtggtgaagaagagagcatcttccttcttccaatgtccttatgtcagtctccagcagaagatgtgtagattaaaggtgtgcagcaccacacagggatctgggacttgttttgtcctaggctgaccttgaactcagagatctccttgcctttgtctcctgggattaaaggtatgttctacctggcctggacctaagcttttcatagctattatgcataaaaatcaacatgccaagatccaggtcagaaacttgtgtcttctagcctcaagatctggatcacaggtgagccctccaattctggattgtagttcattccagatatactcaagttgacaaccaggaatagccattacatctggctagccaccttgccctaggggttccttgtctctgccttccacacattggcattatagaaaggtaatgagacacgcctggtcactacttgagtcctggctgttctcctcacccttgcatggcaacccattgaaccaccttcccagactccttcttccactcccttccattctctcctcctctctttctccctttctccctccctccttccttccatcttttacatctctatttttgatgtctttatgtatgtatgtatgtatgtatgtatgtatgtatgtatgttactcaagtgccatggtccatgtgtagaggtcagaggatcaccatgtgggttctagggaatcaaatatcagacttggcagcaaaggcttttaccagctgggccatctttctcttgtctcttgattaaaagaaaagggttcttgctgcagacccaggatttccctggctaaacacttcctaccagggacactcctgggccctaggagccacagagtctaagacaaaggtagaccattttttgttatgctccctgtcttctgttccaatctctctagactctagactgacttctagctctactgcagaagaagctctaatgcctgcaagagccatttctcccacccagcctccacgccctagggactcaccctcttccagaccctgactgctctagctctttcttgctgcccatctcagcccttcttcctagcccatttccatgtggtgtcattgactgacctgcaggttcactgtactaggaacttcatagccaatatactgactgcatagtatccagagtaggccacagtaaccaaagagtggaacacccattctgcaaagacaaggccagatgtgtacacctaaaatatcataactctaggtacctaaatccaagtgcaaagtcaccaacatgaacagcctagacaataccctccagaagccagtaagcccactgcagtaagcccagagaaatggaattcagcggaagtatgagacaaggacttcagagcagcaattctgaatatcttcagtaaacttaaagagaatatgaacaaattaatgaagaaagaccattaaaacaggagcagttctttgaaagacatgttacaagacgtggaaatgagaatttcaggtcttgaagacaaggtagaagagagaactagtgcaatcagagaaagtgttcaatctaaaaaaaaaaaaaatcagacacaagacatgaaggaaatttaggacactataagatgaccaaatctacaaataatagggatagaggaagaagaaaaagaaacttagatcaaaagcatagaaaataaaatcatgaaatcatggaagaaaatttccctaaatgcctcctatcaaggtacaagtgtacagaacaccaaatagacagggctagaaaagaaattccctgtgacatagtaatcaagacattaaatgcacagaacaaagagaggatagtaaaagctgcaaggagaaaagtgacttaagtgacatgtaaaggctgttccaagagaataacacctgacttctcattggagactctaaaagccagaagggcctggacggatgttctacaagctctaagagacctcagatggcagcccagactagtatacccagcaaaacttccagcccctttcctttcagatggagaaagaaaaacattacaggataaaaaccaaatttaagtaatttctactaacccggctctatagaaggcactaaaaggaaaacttcagctgaggaggttaaccacatccgagaaaatataagaataaggaattccagacaagaaaatcaaaagtggggacttacaccacagcaacaaaataacaggaataagcaaaaactgttcattcgtaactctcaatattaatgatctcaattccccagtgaaagaactaaaaaaataaaataaaataaaataaaataaatgacccaatttaaaagatgaggtacggaactaagcaaagttctcaaaagatgaaataaaaatcaccaagaaacttagaaatgttcaacacctcagccatcagggaaaatgtgagttataactgctttaaagtttatcttacgccatatagaatggccaagatcaataccataaataatagcacatgctggccagagtgaggggaaagggaacactaatccattgctggtgggagtgcacactggtgcaaacactgtggaaatcggtgtggctgtcttcaggaagctgggaatccatctacctcaaagtctactcttggactctacgctctactgcagacgcagagctacttgttgacccggcctcattgcttccctctccataagaggcagacgctgcacacagcagagatggccgtcgacaagtgtggtacgcttatactgtggagtgctagtcagcagttaagacaaatgaaattcctggtaaacagatgaagctagaagggaaacatttcaagtgaggtaacctagacccgaaagactaatacttaatgttctctcttacatgtaggtgatagcttttaagccttcaaaatatgtggtttgaacaaccacagaggataattgcctagcaaggcactaggtgggaggagacgatctcccaaggaaagggaaatagaatatattgttatggagagacaaagtagtaattaggacagaaggaatagtagggaggggatgagagagaaaggtgaaggagagaatattagacagctaacaacagaggccattgaaaaaacgtatagaaacccactactgaagatttctaaaatatatgcgtctgtgaaagaaacgtgaatggagtcatcaaataacaactatgattttcagacacacatgaacttacagagatcgtgacagctcacacaggatcaagacatcctaagtctcagcactgagaggggaaagtggacacaggtcctcactcctaaccaagaaggtagctacagttgatatctgctggcagactaaaaactcagttttctccagtggagtctcttaggtatagtaactatacatgcaggcaggccagcagtactgggttaatccaacaggtactcaatggtatttttgtggactttttgtttcattctactttgtttggacatttttttcccctccgtctttattaacttggctatttcttttttttccagagctgggaaccgaacccagggccttgcacttgctaggcaagcgctctaccactgagctaaatccccaaccccaacttggctatttcttatttacatttcaattgttattccctttcccagtttccaggccaacatcccccagcccctccccttccccttcttgatgggtgttcccttccccatcctccccccattgccgccctccccccaacaatcacgttcactgggggttcagtcttggcaagaccaagggcttccccttccactggtgctcttactaggatattcattgctacctatgagcttggagcccaggataagtccatgtatagtctttaggtagtggcttagtccctggaagctctggttgcttgacattgttgtacatatggggtctcgagccccttcaagctcttccagttgtttggacatttttaaatcttttggtcttttgtttgtttgcttgcttttatttgggggtcgtgtttttttgtttttttgttttttgtttttttttgaaagatgagagcaaacttgaatgggtagggaagtggggaagatcttggaggaatcgtcagagaggaaaacatgatcaaaatatattgtttgaaaagaaatttttaaattcgtcttgtgattcctaagccaaccagtctggtgttttatacattatttcattcattcgttcattcattccatgtacagggtgtgttatattttgagttctgtgcgagactctgaaaatatgaatcaaaatgattcattggccttgccttcggtgatcatggaagctaaccaaaatgaagccagaggaggagggagcctctcttgacttttggcctttgtcctggccatgctgtgcctacagaagggccagtgtcaggctcatggccctggggatgcattacccaaaacatttctggaaatcctttcagaaatccttgcagagatcagagaacactgcgtcttaacgacaagctcagtgtacgagagcactttgctcacagggagaatgggctctttttttttttaaagtgttcaaaaacatagaaagtacagataattttgtaccaaatatttgagagtcctctggatgtaaatgaatagttggcagcatcagcctcttactgcttctgctttgagatttttaagttacaaaaagggaatgttactgaaaaatgaactctctgttcagttccctcacatgactactttcaggaggttgaggggtgtttgtgtatggtgtgtgtgtgtgtgtgtgtgtgtgtgtgtgtgtgtgtgtgtgtgtgtgtaggaaagcatgcatacttatccataagcagtgtattttgtgtgatcacgaacattcaaacagacctattaaattaggtagaaccagcttgtaataaatataagaaatggggcttggggatataggtccatgggagcacccttgctcatttacatctgagcgaggccttaggtgcaatcaggggagacagctataaagccttgggtctgtttgggggtgccttctcaaatcgtcccaagaacacatgccaaaagaagttctgaaagtgatgtcaggaagacaggtttattggaatagcttgcatggtgccactcacgcgggaccgtaaggaccagcagttgtttatataatatgtgcagcctaatagtattttccaaccagtcctcaccactgtagtccgctactcatttcccagaatggccaggcaggacactttgtaaaaagcctattttattcctccctcggctgctgtaccacaagatgcatttaagatatgtatctaaagtcactgtcacatgtttatttctgagtccatgtttttaaaagcacagaatgaagatgtttgtctccaagccttgggactcagaaaaacatgtcgattagcaaagggcatgtgtctgctcagcagtctgtttggaagctttgcttgtgtaacggaaccatcacccccgagctctggatgtctggtctatctgatgcaccacagctcacaccagagaaacttagaggaatgagcatgggtacaaatgctttctcctagggattcttgctgccctgcactcctgtgctcccccctcagcatgtgcctttattaggccactggagattatatattatatatgtatatgccagtatatatatgtatgtgtatttatgtgtgtatgtacacacacacacacacacacacacacacacacacacacacactcactcaggtttctgatgtgtgagcatatcatgaagatgctcaactgggcccacattgactggggaggctggagtcccgcaggttgaacaaccctgtactaatttacacctcagtgagtttcccttccttatgtgagtggggacatctcaggctcaaagtccaactgggaaagcagcaggttatatcctgctagttactatagatgtctcaggcctctgttgtagtgtttcctcctagaaatgagactgtccccttccttttctactttatctactactatcattcattccaaatcattgtcactccccacagtatctgtagaagggcaactgaactgacctattctgcaatcaaatttatgtacttgatactttcattcagatcaacagatttttctaggcattatgggaaatttaaaaacaagacaacacatctctatgtgagtcatatgatcagtcaagttaacataaatggaacattagagaatatagacactgtaggactgtgcgactggatgcaggttaagggtagaatccagcatgggagaggctgtggctctgaggtgcaaggacacatttgctttgttttgttttgttaaagaacaatggggcttttattgctcataatgcctagtgcctgcattcttttttttattggatgttttatgtatttacatttcaaatgttatcccctttcccagttccctcctatcccatcccccctcctctgcttctatgaggatgctcccactcccacctactcactcccacctcaccaccctggcattccctacactggggaaatgagccttcacaggaccaagggcttctcctcctattgatgccagacaatgccatcctctgctacatatgtggctggagccatgggtccctccatgtgtactcattggttggtggtttagtccctgggagctctggttggttgccattgttgttcttcctttggcattgcaaaccctttctcaagtcctttccccgaactcttccattgggggccccgtgctcagtctgatggttgactgcgagcgtcttaatctgtattggtgaggctctggtagagcctctcaggaggcatccatatcaggctcctgtgcaaggacacatttctgaggaggtgaggtgtcagccaactctgaagggcagagctgtggcggacacttggagcaggtaaggtgggaaggctagtgagcagtgtgagaatgcacggggtggggggggattcctgagcagggtgggaagacattctggtgtgaagagatgtttgggataaagaaggggtctgatttatggacattgatagggaacaagtgggaatcgagaagcagttaagtatacattctctccctcatttctgcgtgctgattcgatgcctggcagtgttctaagattggatggaattgtgaatggcctaggttgggctcctgtgttaaaagaagaaatattcccaagtggagacaatagacaaagcattaactaaacaagggtgtatcagttactcttcaaagacatgaaagggcgtctgaggtatgggcgctttaaacagcatgcttagtatgtgagagcatctctgggcgaggtcaggcaggagtcagtacagtgtggaggaagccaacaggagtgtgaaaggagtaaagaggagctgagcagggatgagaggaagcaggtggcagccctagaatcacagagaggtcctagaggcagtagaagaaagctcaagcattagaatgatggaatagaaggaagacgtgattgacttttgtgtttaaaagatcaatgcagggcctgggaagacgggtcagtgtgcaaagcacttgctacacatgtgtgaggaccgaagttcggatccctagtgaaagctacgtaggcagatggttctctcatagtcacagccaggaggcaaagacaggaatctctggagcaagctggccagccagtgtagcaaccagagatcccgcctcaatttataatgtgtagagtgcacaagaaataaaaagcacccagtgtcaacctgtagcctctaattttattcacgagcatctacatccatgagtatgggaatatgcatacgtatatgcacacacctcacacgatcttgggacaaaaaaaatatcgttctactacatagagaaacaagagacggaagcaaagagatgggggggacatggtatggtataggtgcagctgatagggtaagaccagagaactgcttggagggagagagaagaggtagctggggctctttctgagaggagaatcaaaatatctccatagttggaggtatgggtgtatattgacgatgttttaacatttatttatgttatgtatatgagtacactgtcgctgtcttcagaagagggcatcggattccattacagatggttgtgagccaccatgtggttactgggatttgaactcaggacctctggaagagcagtcagtgctcttaatcgctgagccatctctccagccctatactgacatttttaaatagagattaaaatgtctgaacagaagtaggtttgcaggatgattaaaatttgaattggggatgaaaatttagctgacatttgtggtcctgtcacttggaacatgaagatgggagagtgaggagttcaaggtcagcctgggctacagaagctgccatttgaaaaaaaaaaacagaagccaattgggaacacatgaagtctaatacgtttattgacattctctgcagtatttttgtatccaagagaggttattactggatatgttcatgtgaacatctgtgtcgtgtatattcacactgataaagaaaagaaagttttaaaaaagaccctgacaacattttaaaaggccagaaagttgtatcatgacatcgttttattgaaatataagcatgtacatctctctgtggcagtgaccagatgagaacacatgatgggggtaggaagatgtgtcataagtgttgtccatggcagatgaggttgttcgaggttttgacttgtatttggggcatgcagagatggtgctctcaagggtttcttcagagccttgtgcatttaatatcgtcagggttcctctctgggcaaatgagataaaggtggtgtggatacatttatgaaattttaattattattgtttaaacttaaaagttagttttgagaggatgcgtttgcatttctcgtatagggctttccttaaataatcctgccctgacccatccagatgcatgtaaagtacccacagggaggcttgagacacagacttggggtttgagacctaagtcatggaaaatgttgattaggaagccatcttcgaggtgggaatagggactgaaggatggatatattttgggggaccattgatatggctcagcagctaaaggcacttgccaccaaatctgaggaaatgagttcagtctgtaggagtcacatggttgacagaagaaacgggatcctgcaagttttctgactttcactctctgtctctctgtctctctgtctctcagtctctgtctctctgtctctgtctctttgtctctctctctctctcacacacacacacacacacacacacacacacacacacacacacacacacacactacattttctcctggagatgtacagtaagaaatgaaaaagaatggactcagatacaggagtcgtaccaaaagagaacagtgaagaagaggaggagtgtggccaaggtgtggcaagctggtacgtgacgtaggaaagggagctggtgcggccgtgtacagccaggtgccggatttcaagggtgaagcaggagcattggctttgccttgttggttggtggaatctccagagacagcagttttaggaactgttcgaggaagtcaggtctcacagggttagaggttgagtcaatgcagaggaaacagaggaagctgacagaggccactccttttaaacatctgcacagacagaaatgggacaacggtaaccagaaactcgaaggagtctgcgactttacacagaaagaacaccacacaagaaggatatgcgagattgagaaaaaggttctttagtccattaagtaactaggcgtggatgaagatgtttagagtacttgatgctggccagtgagtaacaaatgctagcatttgtactagcatcgaggctttaaaaatctagttgttcacagaatgcagggtctcattagggcatcttcacattaagtacaatgatagacatggtgttttggtcatatttgtctcctcgttaccctcgcaccttctctcttcacttttgttgatcctcttccaaacctcaagaagtcttcctctgtttcccccacctctgtctctctttcacacacccatattcttcacatgaaagaaaatatgcaatacttgtctttcttgttccagtacacccttgtgtaaccctctcttcgttcccttcttcccacacagcccccttctactttcatagcattgagttcccacagcaagtaataacattcttcttacataggagattttgagacatgacaccttcctagacagcattgcctttaagaatgtggtcctcattttagttttcttatgtttacatttaactgcctgagtctggagagatggctcagtggttacgaacactggctgctctcccagaggacctgggtttgattgccagaacccacatgacacctcacaatcatctaggactaaaattccagtatatatcaatatgctgacagaacaccatggtcaaggcaacttagaaaaggatgtatttgatagggtttgtggttgcagagggttaggacccatcatggcagagcaaagacactgtggcaaaacagctgagagctcacatcttgattggcaagcaggaggcagagaggacactgggaatgacacaaatctttagaaaccttaatgtccagtgacatgtctccctcaacaaggccatacctccaaatccttcccaaacagttccactgaggaaacatatgagcctatggaggccattctcgttcaaaccaccacaggatccaatgtcctcttctgcccttggtgggcaccaggcatggatgttgcacacagacgtacacagaggcagaacactcataagagtaaataaatcttgagaaaaaaaaaacaataaatgtatgttcctatgtttgaagtagaaaatgatggtattttttattctgatacacactgtgagtgttccactgtcaagagatctgacttctggaacatgaaatctttgacttaaaaagaagtctttttggatataatcaagttacagttgtcttgtgttaggctaggtcacaagtcccaccactggtatcctgtgggaagagactcaagagtgtagaggcagccactgggatgactgaggcacagtggctgtccttccacaatccagggaatatcaaggatgccagacagatgctaccagatgcaagaagtcttctctgtggcgccttcccagcaagcatggtctgactgacaccttgtttcggctgttggcctccaaagctgtgagaaaatagtgtctgtcattttaggtccagtttgtggtaaatttctgtggctaccctgggagactaatacattcaaaagtttagcaagttaaaacaacagctgtttttgcttctcctgttgcatcagtttggctgtttgggtctggccagctgcatagctcttctacgggtttcagttgggggagttatgtcacagctatctggtggcaggggtgaagtaggaagatggcctcctgcaggagtccagggccttgatgatgacagttgggaactcccactcccggatatcttgatcacacctggcttcttagcaactttacaaggggcatgagtactctaagaggacaggtggaggcttctgtctggagctaagcttcagtactctcgagactcaggtaggatgctgctacacgacgcttggcccttttactctcttatatgctatgggggaggtgatcctgtccctgccatcacatatgctaagaggggagtggatcctgccatggcgacaaccttcagactgtgtaagccttacctttccctgttcacctcacagtacccattttatgggcaggaagactatgaatgggtggcactgcctccctcaaagacaccagtgagtcaccctttgtgtgaaactctttggtccatgggagacatctttgtgtctggaagaacaaatcacaactctgcctggaggcaggtgaatgcatttaataacttcgtgggtttctctttaaccccataattaccctgatggagctcggattgcacagctgtctgaaacagaatggagtttaaggcatcagagagaggtgccatggtcactcaagagatctggagattcggcaggattcggctggagtatgaccaaaagatactgaaagcaacaatcagactgtagagggtttatctggtttttcttttcctttttatttgttggtttttgagatagtttttttaatgtagtccagcctggtcttgaaccaacttatatagctcaggctgacctcaaattcatagtgatcttcctgagattataaatgtgctgacattttaggtgtatgctgccttacctgactggtttttgttgttgttttgttttgtttctctcaataagaattgcagtgtttgggtccttgagatccctcagcaggttgagttcaatcccaggagatgacaagagaaatgtctctacagaattatcttctgacctccacacatggaacacatgtgctcacgtgcacacacacacacacatacacacacacacacacgagttcacacacacacatgcacatgcacatgagtgtgtacacatacgtacacaagcacacacacaggcactcatatgtgcacagtagggagcggtgaattcaaattcagacacttggcagtgggcacacacatgccatggtgcgtgtgtggatgcctgcggccacagttaggaaatctgttcgcccttccacagtgtggatattgaactggacttatccagcttcagtctggccagcccagctgcttctgtgtcatgctctggtgtgctgtggctttcaggttactctggcatcatttagcaggtcactaggatggcgacagagtccttaaattcctcaattcgaaaagagcataagacgttccctttaggtggctagtcaggactgctcctaaggtctgtccatacatgatgtgtattccggggaatgggggggggatggatggggggggacgatggatggacagggggttatggtacaagcctggcagccatctccatcagccactcatctctgtgaaaagagaacgtggatctttggcagtcaggtaggcacctgtgtcacagattacagtcacaaggaaggagcggagtgtttcttcatcacgtgcaggcctcccccgggtttgctgttgcctggcagataacagtggtatggtccgcataacaggacctgggccaggtctacaagggaaagagcagtcacaggctcatggacaagaggcctaaggtgctagagggaaaagaattcaagatggatttgtaagtcaggagtggatgatcaggttggggaacggggcagctatgatttgattacagtcaagagccccaaatgtaactgaactctggaaatcacagcaactactaaggaaccaggtgcttgactgttttgttttgtttgtttgttttttcccttagaacatctgaatttatagctggggctttaaagtgagaccctgtcaaacaagacaatattttattcacttacaaacatagctcatatttgcaatgggcatatgtatacacatgagcatggagcacactgcttatactttgtggaaaaaatataatataaaaataatataattttgatggaaagagacttaaagggaaaaaatgaaaattgggattgttaaatttctcagggatgccgatgttctgaggactggaagcgatttaagatcctcactaaagtttcctgaaagtacctttattggatggtcctagtaatggaagacaaagagcgtttcttagactcatgtaagtgcctgttgtgagcatttacatatgggatagaaaccatggaatgttacagaggagagctaatagggaggtggccctgaggatagcaaactacccggatgacctagaccgagacctgcttaatcgcctcctcctctttactaaaatggaaaatagcttgttattccaaaagatatgagttagtcattcaacaggctgaaacgcagagacgcaaaacttcttaaaataaaagtgatttccaattgttggacctaaagttcaccgctttttgcagccttgatagcacgcacgcacgcgtatcgattctacaaacttggaagcttgatcacacagtgttttataacatgctttgttatgtaaagatgtggcagcagcagcttttcttgtcattcagtagtcttggcttatatttctaaggaatgtgaaacatcctcctgggagggagagcaaacttcccctaattctctagagagctgcattggtttccaattaatcatcattagagatgcactgtgctaaatacatgtgtgtggtcatctttgcatgtgtgtgtgtgtgtgtgtgtgtgtgtgtgtgtgtgtgtgtgtgtgtgtgtgtagatggatgtgtgggtgtgtagatggatgtgtgggtgtgggtgtgcaagcatgtatgtgcacatgcctatggaagccagagccatccttgagtgacattcctcaggttccagtctgtccttgatgtgtagcttatcagacaggcaaagctggctaatcagtgaggcccacgtatctgcctgtctccacctccccaacatggattacaagtgagcactaccacactcagctttctttgttattgttttattttggtttttgtttgtttgtttgtttacctgggtttaggggatcagactacagtcttcatgcttgtaaaggcaagcccctggtccctttactctcgtccttaaggattcctcagggtaaatgctgcagtgctatcttgggttgagatgcatgcactggtgtgtgtggctgtcctggcctccctctggaagggctcaggtgacatatgtttttaacatgaagtttaaagatgctttgaaaattctgttttggaattttgaagctttgcctcactcattgggggtaaaagccaattaattatattgcctcagcctcctcagtgttgggattacaggcctatgccaccacacctgctgagatccccctatgttgtggtggctgtcattttgatatttctccatacttccttcccggtatattgatatcctaagttccaggatcatctcaagcttgcaagcttcctgcctcagcatcctaacatatttaaaaataattacattataggtacctttaagaagaaattaaccccaaaagtttaaatggaaatcactatgataattgaatcagtcaacctaaagttgtctttgatctggacatatactattaattcttcaatttcctgatggctacatcttttaaaagaaatgctattctggcttatcttggtactatttgaggggggttttattgttgtgaagagataccatgactatggccactcttataatgaaaaatatttaacgggggctggctttcagtttcagagacagtccgttattaccacagtagaacatggtggcagcagcctgacatggtgctggagaaggatctcacagttctacatcttgatccacaggcagcagaaggagactgtgtcacactgggcatagcttaagcatatatgacctcatatatgcccacctccacagtgacaaacttcctctcacaaagccacgcctcctccaataaggccacacctcctaatagtgctactttctgtgtccaagcattcaaacacaagcatctatggggtgatacctattcaaaccaccacagcaggcatcgagtgagttactattctagctattcccaagaatctgtagtaaagtcgacacttgtaggcaatttatatacacttgaaaagaatacagttttaccgaatatgagagaagaagagtaatcatcagtctaaccttctcttggccttgtgagctacaatcatgcctagggtagcaagacacatccactggtgtagtagtagtagtacagacatcatgggagtagccaaccatttttatgattggatttaagtcctgcaccacaagacaaaaaccaaagccagcacccaaaacctgtgactagacatgtcataggtcctaaggggaaagttcattcctcttattctgttatatggatgttattaaactgattcctgataattacctttacacccatagacgaatgtgtttctcagccctcatcagaaaagcttcttatcatagcagatgactattggttcaggccatggtacatagagtaaaagacttaggaatactcagccctgaaagtgacctctgggtcataccccccttttcgggggcttgggagtatttcagaaggggctgggaagagtaaaagctagaggcagtgggtggctacaaggaaacagtgtcttctggacagagcagggcatccacacatatgaactcacagcagtaaggcagcacacacaagacctgtgcaagctcaagcctgaataaaacaaaaaacaaataggcatggtgagaggcagtcagtagggtgttcctcccccatacaggaacgattggcagtgatgggtgctgggagaggaagggtccattttccttaagaatgtagcccctggtgagtcaaccgcactgcagcgggaggccactcatccttccagacatacaagggctgcatacattggacttgataggtttcagggttggggcacaaagttgggtagggatagtgaaggagggtgggtctccaatgagttgggaatatgatcaaaacacattggaggaagttctcaaagaactagccaaaatcacttagaagaaccactataatcaattttgcataatttcttcttcataaccaaagctgtacactggctacatttaagcttggtatccttataatgttctgagttagcatattcgttcgtgagagactagttcctgagcaccgacgtgtgccagacaccgatagagctttagtatggaaagcccctgctctccacttgaatcgtgacatgtactgagtaacagatccatacacaaggtaatatcaggtaatgcccttgttccttgtctattaactagagagataatagtctataaggtttataggagactatgcggaagttgtttacattgtaagtttttaatgagtattattaaagttgtaaaaaatcattaaattctcacaaggaggaaattagccaactattttatattcaaggaaagttttctctgagtctttctgagtgcctgtctgtctgtttgtctgtctgtctgcctctctctctctctctctctctctctctctctctctctctctctgtgtttgtgtgtgtgtgtgtgtgtgtgtgtgtgtaagtttaaatcatgtctgcttctccacaggtaagggtggcctgtatcttctcagcaagtagctctgctgattctcgttggcttttgccactgaacatgggaaggggagttttgcagagctctatctcaaggtgaagaagcattttctcatttccaaagctgtctcagagaaatgtctgttcttatccagttagatcagcttagaaagatgattaccaacccccaaatggtctctgagaagaaactgggacctaggcctaccaaaaatgagattcaactgtgacttgtttgtttccttgctctttttcctgtttctttttcctcttgtccttcctcctcttctgcctccttttgaaataaagtcttggaatacggcccgagctggttttaaatgcctcagcctcatcgatgttgttgaatgcccaaattttaataaaaggttttttttgttgttgttgttggttttggttttggttttggtttttttttttatttttttgtcattgctgatggtgtttgttaaggagggagggagaaattcagaaagtatttcaggttgttcttgaacacacaatccttaagatctggaattacaggtgaatcccactatactcagttgttaactgtgactttttaaaatttctctgttttactgagaagtgaaaaaggtcagctgtggaaaggtcaattatgcttcgtcttcactgatagggaaaccaaatctaaactaggaaacactgaaaataaccaggggtataatccttgtcatatcaaaaagaaagagagacgttgagtgggtccatgactttctttttattttatttttttatttacatttcaaatgttattccctttcccagtttcccagacataagcccccatcccatccccctcctcttcttctatgagggtattcccctccccatctatctccccttcccccctccattcccctacactagggggtccagccttggtaggaccaagggcttctccttccattggtgcccaacatggccaacctctgctacatatgcagttggagccctgggtcagtccatgtagagtctttgggtagtggtttagtccagggagcactggttggttggcattgctattcttatggggttggttgatgactttcttaaaagcactgcattcattgaatgcttcttgtatcccacatgtgcattacagtgcatgattcataacagcctaaaaagttatggatgctctcattctccttgcggccaaagaccccatcctattcaagacctcatcctactcaagacctgaacacagcactatgcccaaaccccggtgatgctgagacaaagctgggattttagcagtggcatttgctatcaccaactgtaggaatcaaacagactttttggctgtcgtgagttttcatcgtggttgcctcttgtggtttgaatgagaagtgcccctcataggctcttgtatttgaacacttggtatccaggtgatggtgttgtttgtgaagattgtgagcctttgtggggtggagccttgctgcaggaagtgggtcactgggaatgtctgtaaaattttacagcctggccccacttcccattctcgctctgcttcatggccgtgaatgaagtgcaaccatagagcctctgactcctccgctctgccttccatgccctgatggcttgtactccccagagactgagcaccacaacagacccttccttccttaagtgagtagctaataggccatctatgtgctgaggttgtctttccaaaggacaggagatattcagtttcacctcagacagtcagaggactgactatggggagaggtggactccatcctctctgaatggagggagagaatctcacagctcctggcaatcgtggagagttctctcctcagaggagcttggaaaaaaatctaaagcattggaaccaacagaccttttggccgaaaggaattttcgtcatggctgtctattgtggtttgaatgggaaatggcctccatacactcttgtgtttgaatgcttcgtctccagtcgatggtgttgtattcctgtgtgaaaagcaagaatagtcttggctgtgaacagcaacaaaagtgtgttctcaagctaacagtccctaacctttgccctaccacatcatcagactactacttcaaactccacttaaaaacactactgcttagcctccagggcacagtcagttcagggggataatgcaggaagctagagttgttgagatgagaaagaagatgtctgggctggtgggaagtcccatgtctgcatttctgagtaacagacacatctccgtttatgtctgaccttgcatgaccagggcacactcctgaccttgagggttgctaacattagtacccctccttcacacccactgagcatgagttgctgggggtgttgttgttgctgttgttgttgttgttgttgttgttgctgttgttgctgctgtttgtttttatctcagaggacatgatgtagtgaaagacaggtcttagttctcagagtctctctgtgccaccaatttgaatttcagatgctaagaggatcacattagcaccctgacagttcatcatttgctgactgacacactctgtttcgtctcaagagcccctgggcaccctgagggtaccacttttaggtcaacctctgggctgttttctcctcttcccttgacccccattcaagggctgcaggtgacgtgtagggtaagtagcacttatgcatcgtgtggcctgaatctagagagctgataccacatgtggttctcatcctgccccttggaagcttagggcttacaacaccccattctctctgcaatcccatcctcagagataatcagttgcgacctcctactccaaccttaatttgctccttaacggtagctttcaaagggtcgtaccaaggaagcaaaactatttttgttcagttctcattctttctctccgttcctccctccctttccccacaaaaacacatagtttggaaaacagtatttaacatatactatagccagtgtactttgatctaatgtcaaagcttgtatttcccctctacgcacatagaatactcccttctttaccttagtacttctctcaggtttcaacatgtgactggttacgtaacatccctcctttgctcccagtggactgtaaatttcagtaggttagaatctcttctaccagggcagacctccagaatacacagacatcggttttcagatcacttgtctctttgctaacaccaggcaggtttatagttctggatcatcctcccctcctgaggttgttagctggtttccagggtcacgtctgaggcctgggggagggggggctctgaattattactttgtttatggtgctatgactatctttagttagcaacttgtattacataatcttctaggataaatcctttttaagccataggtggctcatgaagaatctagaaaacaacttgagagttgaaagactatttttttcccaaaaaccaatggaagctaacccctacccctatcccctgccgtgggctgacatcatttgctgtatgctgtaattgagaaggaacctgatagctaaagcatgtactctgtgcagattactttttgtctgatcaagttgtagaaataaaggagcagggggatatttagggaattgcttccatagggcaaggagatattccttcaggatcattccagtttctgagtcctcatgcttttgcatctggaggcatggacactcgactgatggacagtttctccattgtcaagagagaccctcaagaagcacaaggaagttagacaaaaggttgtaccatggaggaaaaatgagattaacattatttctttaacacaaatattgatattagaagtccttaataacattgaaagcacatgtaaatggtagatgtagtaagttgaatatttaatgggttggggtttttgatgtgtttttatgtgtatgcacataaacgtgtgtgtgtgtgtgtgtgtgtgtgtgtgtgtgtgtgtgtgtgtgtgatattaggtgtctttgtcagtcaccttccacttatttatttatttatttattttgagacagcgtcttcccctgaagacttagtgcagttaatctgcctcccagtgctgggatcacagccttacgttatgacacccagattttcttgtgggtttcaaggatccttgtgtatgtggctaatattttagcaactgttcatctgtccaggggctggtcagaactgttctgagaaggccttgctgcatagtatggatctagaccatcaaacttgcgatcctgcctcagtgtcctaaattctggcatgacagacagacagcagcatgcatggccaaaaaggttttaaattttcacactttccagttagcaattattattttcacacttagatgaagtagacttttataaattattaagtgttcatctctgataaatgcaatgaactttattttttaattcaccatactcttaactggaattttctacttcattttaaattatgtttaaagtcaggagaaataggaaataaactgttattttatgtctttagtaccccacactgtatacttttaactgaaagagcttttttttttttctctacaataagcctttggtagtttttgtttttcatttaaaaaatgtaaatgagtgctaaaaagtatctgtttgaaaggtgtgaccttctttgggaaaattatttccagtctatactgcactaaaggttcttgaatttgaacaaagagagttgcttaaacaaaatgcataatatgcgctgaagctccaataggtgcaaaaagagaaatcgcactaagtacagtacagagtctctgactgtttggagtaaagaacctcatctgaggtgacagatggttgaactatgctgtcacctactaccacctgaagtgtgtgccctcagagttccagaagggctcagcgcccttgctttggccctttggctctgctgtccttggcctgttagaaggacaggttgataccacccttcagtctccaactttgaactttcagtcatggcgtgggcggactccttactgactttagtttgtgaatgctatcctcctccctttctgcagctcctctgttgttccttccaactccctttaaagccagctccattcacccatccttcagcctggtttggtctgcggctggttaattcattgagttacaggtcttagatttaattgcacttttgcagaggccatgctgttacaacagcagggtgactacctgaggaagtagagccagttcttctgaagcagaggcttctgcatgctcaacttgcagctgggcattttggtccgatatcctgctgaatcctgggtagctgagcaaggtgagggcaaacattggatgcgcactgtgggacaagaattgctcctacatgaatgaattggtcacaggaggccactctgtcccacgctgaaacaaaaaccattcctcagttctgtctctgtacctattatctttgtgctgatgttgctgcattaaacactgcccctgcctggaacttcataggatgctgggaagtttcccagaatcttggatcactgctaaaaggactggcaaacatccaggtccagagatagcccagtgacgtgaagttgggggaagtgctgcctgcagcagagcattgacccccactctcagcttgctaagctgagttctgaatcctctgaagcagtgaagaagtcaccatgcaaagctcagccctcctcagactacagaagattccacagaggtaacagaaaagggaaaactcagccagcaccactctgacagtgtcaattaatctccttcggaagatttaacatgtaataataagccttttttctctgttagacttggtttgagtgcatcacatctgcccgcctacaattagcccttaaattagccctgttgcctttaactgtggcatctagacagtcaacatgaaactacagtgaagcaggagcaggctgcagggccagtccttcattttagaatgtgggcggtgttaaggagaagctgtgcccctgaacccctgtctgtcttccacaagtaaaggtcttttcctttgccgtaagtcctggtgcaagcgtttaccatgcctgcaggagcatttggagctgaagacgggagggcacaggaggcccgtgttgtttaatattaaaccaacgggaaatgccctgggctcgtgagccaccgctttcactagggcaaattaattgctttatagaaattcctttctgtgttctgtagagaaaatgtttccactggacctaaatgaccaaaaggagtagtttgggggctaaatagctttgacattgtgccctgaaggaatgagacaattaaagaaactgacttcctctgagtaaaaactatttataataatttatctgcataacatgactccagactcattggcctggggctccctggaattgctgtgtgtgtgtgtgtgtgtgtgtgtgtgtgtgtgtgtgtgtgtgtgtgtgcatgcgcccatgcacgcgctgtcctaggcacatgctggtttgttacagagacactagggatctgaattgaggtcctcatgctagaatggcaagcactctacctactgttaattactctggtccctatctctttctttttctttttttctttaatgttttcccaagcttcaagaacaagaattaccctggaaccccatcccctcatccccacatttacacaagtgctactgtttgagggaaaaacaaaacgttagacggtcttaaagggggtggaaagtcatttaagaaacagggtcactcaagagacagagttaatagttgcagtatcttcccagggacagttcatgagggtgagggaccaatagcatccaaacaaaaccagggctgtccagtgaaaggtcactagtggttttatctagagcagctactgcagaacagtgggggtgaggagggcagaggggagtggagagagacgggtagagcctgctcttcaggggaagtgggtagtgctgacttagaggcaggctgcctgcgaaggaaaggtttccctttcttatggcagtgggggtagtggtcatgggacacaagaggttgggggtggagggtgtctcaagataagatatgaaactcacgataaggagcaatcttgggtaaggcttgaatgaagtgtctgcccctaggtacctcctcttcctgcctttgcccacatgccaggaaaagtactcactgcgataacagatttttgccctggaagggttcactgaacttcttttttttttttttttttttttttttttttcggagctggggaccgaacccagggccttgcacttgctaggcaagcgctctaccactgagccaaatccccaaccccttcactgaacttcttgatgtttggcatttatccatagttgaagcaagaagagacaaagctgtacgcacagagaacatcagaactgaggaaaaatgaccctcctgtaatttttttgaagcctgtgcccattgctgacgtgggtgtgtggattacccatggaacatattccacagtcacttacccatgaaggattaatgatactgagctgggttcgacggcttagcagcaggccaaacctgttcttttcaagggttgggaaaaccttcgcatgcctaactctctgatcccccgggaaaggaaaataccagaagcccagctcccgtgacaggcatctctgaagtgttgctggaatgagtctctccagtagggctgtcttccgctacctttcatttcttcaactatctgtaaagtctggcgcaagtttcttaacctttcttggcctcagtttcctcacttgcagagatgaatctttaccctgtttggtgggtgcaggcgttaaataagctcactagagcattcctggttagacagcaagtattctgaatcatcactggcattcttttaaaaaatactgtttaacattttttttgaaattaaaatgtaattacatcattcccctctccaacccctccttactcttactcaaattcatgccttattccttaattgctagtacatatattatatataaatatgttttatttatatgttaccatatatttcctaatatatgtctgtggtcttctcattctgtaacatacacacacacacaaacacacacacacacacacacacacactcacacacacacacacacacacacactcacacacactataatttcagggctgaccacttggtattagatagtcagttatgggtggggcttgccttgggaagactgtcccactcccaatgttccttagttgtctgtaactagcgttcttaattgctataataatagtagtgatggtggtacacttttccaatttatagacatgataagtaatcttgtcactcggattatgagactttaaaggtccccctgaaagtaaggagggagcttagctagcacctatggtctgcagaccctggggccacccttacagcttgacagtttggggactctacctttcctctctcctccattgctggccccactgtggtcatttatctaggactcttctctctcataggtcctctggcctgatggcctctgcctgttgaagcttctctgggtcaccagccttttccctttgtcatgtgcttagctgtgtcaactcctttgcttagatgaggtagctggcaatcgacaaagcagggtttgaacaacaggcgttgttcctgatttcaaacataagtggtttgtaaattatcgagaatgtctgtgattatttcttgctagatttgtttattttacaaaaggactttgtaaacaaccttacataagttgatacaagttttgtgactaatttgtgttggtagccagtgtgcatataaagtactgttgcttcctaatctagaggaaagtgaagataggggcaaagctagttctagggtgttctgtagcacagttttattctgccctcgggacaaggggttgattcagagtctctttttccccccttagactagctttgaaactcgttaccactcttattatcctgcattccttctggtagagaactatacccaatttcatgtttattatttgggaactgcatgggagagcagtttaataatgaagtggggactaagacccataaggcaagagtgagaaccaggcacagttgtaggctgtgggcgggtatgctgctgactgacaaggactacagatagtaaggagcaagagctctcagagatgaaattccactccatatgttattctggattaagaccatccttctgtgctctcctggattctgcagggtgtttgggggacacaaaaagagcacagctctttctatgcagttgctgctcagtgtgtcaggattagccgagcatgtttctgaaaggaaccctaaaattagtcaacgtgtacagtccagttcattcactgtgtgaggaataaatattacctttccttgatttcccccttcttttcttcttttttcttttcttactttttacatgtttttacttattctttgagaatctcatacaatatatttaattatattcaccccctcccaaatcctcccaaattcttccccacatccataccatccactttatagtatcatttatattcccccctctctctccctccctccctccctctctccctttctccctccctctctgtctctattctctccctctgtccctcctctctcgctcccctggttgatctagtccagtttgcattgagtgactgctcctagtcatggagcctgcttggagtatgggcagtatattagatgtcactcattgaagaaaactgactttctcttttccagctaatcatatgtcatcatctcctcagctagggatgggcttcatgcccaccaagcctcctccatgctgggattttgtctggcttgagcttgttcaggtcatgtgcatactgacacagtctctataagctagctcatgtgtatgtgtgtgtgccatgttgtgtctgggaaacactatttccttgaagtcatccatcacctctgcctcttaagaggtctcccccacccacttccatatagttccttgagccttcaggggaggagtccaatacaaaaatatgttcatttttccaaggttataattgtcacaagaatgtcagcactaaacgaagtcaagaaagtacaaagttgactacattgtgtaagaaacttagaaggccatggaagacaacattttagatccactggcttcaatgcctctgtatttcccatgtgttttcatggtaaaaactgttccctgtttttttttaatttttaattgatttattttgagattataatcgaatctcattattttctccttccctttcttcctccaaacctttgctacactcctccttgctctctttcaagtccatggtctgttttttaattaattgttgttgcacacacacacacatacacacacacacacacacacacacacacacacacactttcataactatgtgaatagggctaggaattttgaagtcttttctagtcattggagttgcagctttctgttactattacaagaagcttctctgatgaggttaagccatgcactagtgagtgagaatagttataaggcattaggagtcatccctttagcagaataatagtggttttaccataggacccatgccttatgtagccataggcttttggccctattggctgtgtcatcttgtagagcaggccttaaacccatcaaatccaattttaaaacgtggttggctacacccataacatccatgccacttttggaatagtagatggattttgctgggcagatcattatcgtagttcccagggtgcatcgctgagtgagattcatgattccttttcttctccagtagtgtgcatggtatcttccgacacggtgagtagtcaccccagtagggatgaaacttccagttaggtaccaggtagatttctctgtgctctgtgactaatacatgtgatggcttcagtctgaccatcaagctccggatggcgataagaacattggaaataacttaaagtgtttggaggaggatagtctatgaggcaccattgaccaacagctcaaaatatgtaacccattcctggaactggggttttatttcaaagcttttgatgtccagttggtctgcttgctctgacattgtagggtatcgccatttaagctgccacagttggtttttgtacggctttttcagaaggccttggtgttagttccttcccatatttcctccccaaccctgccctccattaaaatccttcctgttctaaagtacctggaaaaacttgtttacatagtataaggagcaacacatttactttttggggcatctcaggaatttgaccttgtttaattatggctctagcatttccatttccctgatttgggggggggggtggtggtggtgaagaattacacccaaaaccaaatgtgtctgagctctgctttcgtctgcgtgagaaccgagcgtgccctgttccctgggatttgaagttggcttaatggtaaggtaggtttcttcgcaagcctttctgctggcactgaatccgcagggcagtcttttcctcttctctaaatgcacttagctatagggcacctgaacccctgcagtccttaaagtgtgtcctgtctgggatcagacagatgaatcacagtctctggagaggagcccaggcatctcccttgtggaactgctggctcttatggatgctgtaatttgaggatcacttccgggaagaggatcccaggacaggctgcaaagtggatgtttaacgtttgctaaagttagcctgttgaattctgaggagctttgtgtctaagttctggtgtcgcaatgtaaaagggtcatgtatagtcccagctgtaagcatcttgcataatcgattgtccaggagtctcacagaatatcttcaggtcacccttctgactatgaggtatcactggatattttgaatttaagatggacaaaaagtgggcaattaatcaatatagaagaaataacctttttatataatcttcatacttgccaaatgtctcctaaaaatgtccctataattttactactttggtcctttgagcgctcaccatttctaagtggtaagagtaatttatgtgtagtagtataaattttgctgttttaaaaaataagtatagcattactcaagccctacatgtggagaaagatacggcatgaaatattactttccaaaagctttcggggggaaaaaagtttttttggccaggattccggacttaaaataacttctccatccataactcagaccttaggactttaccaaaacaaacataactggcatcttgaatagctattccatgcacagactgcatttccagttgttaagccattgaaggggttattgtatttattataccaaatggccgatgctttagcagcagtgcgtaaagagcctgtccggtgaaggacagggttagggcttttgtgaggtgtaggggaactgaataattaggccctttacccagggcgacagaatgtttccactgatggtaaagatatggttgctcttgggaactgttgatagaaatcgggccttgcctttggcaaagggtgtgtgtaaagctaagttagtgtgactgctccttgagagagaaagactcagatccttagatcagttgcttgataacctaagaaggtggaagttaaggtaacttggaagatgaagttatttccagttctgcctcccaagcccatgttcccggaggtaagactcagactcaaaatatatttacaaataccctggacatatggctaggctcttctccaactagctatagcttaaaatatcccatttattctagcctacattctgccgtggggctggttacctgtgctcaggtaccttgcgtttagttagtcacgtttctctgcctccctctctcccaggattctttctcctctcgatatctcgccttctatttcctgcctaagccacaggccgtaggcttcttaattggcagctggtgcatccatacggcatacatgatgttctcccctttgtttccatcacttaagctaaagtaagttttgaaaaaagatggagtttggaaccaggtctgacaggatgggaaagcggatttttaatttccccccaagcctctttaagtacttatggacacggctggcccttgttttaaaaatcattctagccactctggctgctgggcacaccagcatttagtgatacagcttcatgtacacatggaagtcagagagaagcctctggccctgtggtttcctagtgcagctgctcctgtaggctgtggtcctgattgttccccatggagactctcaccgtgcttatcagttagcacgagaaagagcacagagatcacatagtgcagcccctcctgtttacctgtaataaaactatacctctgcctcaatagccaatgtgcttggtcgcagacagatggcagacagcacaccttggggctgtgtgtcctaaggttcccactctacttcattctttgagaggcacacattgcacgggacagcccggcagggttgttaaaaatgctagaagcaggaaggaggatacctgatgtctatcggtctgactgcagtgttcaattgccccacccaggttcctcctactaatggtcttagtccaaaaccctgaccaaaagcttcctcacttcagacattccccaggctctcctgggccaattgatctctctctattgtctgttcttaaggaaccgttatatttataatgctgtgattaacacgctgtccatctgcccacctctcaccacctgttggattaggcttcctaagatcatgaagacatcttcaacttccatctacactgcttgactgagggtgctttgtacttgcctcagtgtttgattagcaaatgctgagccagtcattttcctacacagtttcagcaaatatttgaccctttttggttgtaaaaaaaaaccaccgaggattgctggcttgaactgccatttttcaggctgtcccacaagacttggttcagaagaggcgtgtcacggcaactatgcatttattaacttggtagcaggttggtaaaaatgattcagcaactgctctgggcaagctctgttctgtaagaagttcatggagtcttggtcccaaatgtctgtcatggctatcattgatccgcatgaaaacagagaacttctttccctacacacagccaccaatcctttgtcaccatgctgactccccactagggtgacatgttagacaaatcccagttaaccttaggaacacaaggaagattctagtactaagcctcttaagttccttaggagaaagttgactcatttcactacaagatttccaccacagtataagtctgtcttggacagggtcaaaattggtctggggatcaaggcagaggcagaagcccctatatacacagtcctgcatgcccgtgactacggagcagaccctctctgtctaccttttctgtggacagaatgctttaagctaggcccaagcagaagtgagtggccctgaatcaccacttgggactgaagtctcaaatcagtaaccactgatgttttcacaattcttaaaatcctatggaacatgccttgcctgtataagaattttttagacatgaacttgaaagaaaatatccgagtgaagtagtaactacactctcttgctgtgatgaccatgaggattgctggtatgtttccacactgtactggtggttttctatcaacttgacagaaactagagtcacctggggagagggaacctcaaatgtcacgtttcctccacaagactgtcctgcaggcctatctttggggcattttttgatttatgattgatgagggagaacccagaccactgtgggccgtgccatgcccaggtccctggttatataggaaagcaaagcgaacaagccagggagagccagtgagcactattcttccacgattcctgctgcgagctcctgccttgagttccctcccctacctccctcagtgatgggctgggacatggaggaggaagcgaaaccaaccatttctttctccagcttcattaccggccatgtttatcataccatcaggacgtagctaatacacacacacacacacacacacacacacacacacacacacacagagagagagagagagagagagagaatccatgttttatcacagcatcaggaagtaattaatgcaaacacacaacacacacacacacacacacacacacacacacacacagtccatattttatcacagcattaggaagtaactaatacacacaccctggcttatgatgactctcctcacactttttttttttttactttacaacactgcaaaaaatgatatgtgctcagtaaaaactatatttcaaggcttggattttgactctccccacttggctagcagtagcattaggacgctcccagtgccacacagcagcactaggccacagctcccacttggctacaggatcacaatgggggaaatgttggtgtcctacagtatgctgtagtgttaagcagtcatattttctctcttaaggatagtaaacatagtttgggtgggtattggctccagtgtcctgagctaggtaagcattctgacatcagagtatatccctagcccccctgattctttttcaatctttagacaggaatggtcttgaacttaaaattcactgaggatatgggcatgtgtcactgtgccagcctgaatgacattttcatttatagtgttttcaaattgaaaacttacggaaaacccaagagcctcagtacactgcagtgtgcttgggttttgtttgtttgtttgtttgttttacctgtagattaattcatagtttatctgtagttgatttcatgtttctgtcattttaaatgtcaaaatacaaaatgccttgtactttctgctgttttttgcggtctccctgatgttgtgtgctttggccatttttgattgtttgctatgatcctgtcatagagagttctcatatccacttatgcatgagaattccatgggccatattcttcaaagtgagagcattagatgtgaaagtaaaggcagttgcatagctgtcttgattgttacagtattactttccagagacagtgtcctcatacaccaacccccagcagtctggggcatgctggggaaatgctatctctgtgacctgttttaggaaactttatttccaagatttttaagtgctgggaagcagttaatttccttacaggatggcttatttccgtatcaaggacacacatgtcctctttatgtttgagggtcatgaaggtaaggtgtgattgactccatagggacaggaaagagcatcgtgttcagtgtgttaggaatgagaattcttgatgttgtataaagaaacacacagccagagagaaagttatcaggtaaggcaatctttttataaaaaggatgtgccagaacccatactaggctaaccagcgcaagtagacaaaaaggccttggtcttttatccctgatgtaggtggtacctgcgtctcattccaatgacacaatcttcacagggcaacacaactggccaatcagggacgagggctcttgtccagttgacttcctttgatagaaacagatttctcacaggtactatgtcaggcctgaagtacgagggaagatcatttatgcggccctgaactaggacatttgtgtttgtttaagaactgaagaagccaagcatagttgtaaactcttgttggctcattaaaggctgaggcaggaggatcaccagagttagccagtggggttacataacaagactctatatcaagaaacaaaacgaagccaatcaacagacctagggacattctgattttgtgatagaaagaaatcctgaggctctactgttgagagcagcaagagtctgtcctggtggcccttctcccctccagagtgtcctcaggtattcccacctcagaaagaccactgtgttttatgggaacattagcatgttatttcagaagtcttggggtggaggggggcaaaactgaaggcagaagtttctgaaaaggtttgtattgtctgaaaaatgtcagcttgaaggtcagaaaaggttagatgaggtcattgcctggttgtctgagctttcctgtgactacagtcaggctctaagtgagtaaatccatggctactgtcttaacatgagttcctgcagtgagtgtacatgctacactaataattaatgcaaagtaactttgggacaatctaatatgattttttgaattggtgatgttccaatttctgattaaaatcacacagagataaaacctaaattcccccatttctgctctaaactaggtaatttctgtacccaaccttattttgtactaacacttgtaacttttatctagatcttccacagcttagtacacacctatgcctcacattatatttaatgtgcacaacctagtgactttaaatgcagtctgaactactgacctatcaacacaattttagaacattttcgtcactttaaaaagaaaccccgctcagaggcactttccattattctgtgatccatccacccttttcaactaatgatctaccttcttctggtctgtagattttgctattctgggacattcatgtgaagaataatacatatgaggactttgatttgtttgttccccacagaatgatgcttttggggttctcccgtgcagtaccatatagcagcacttggttcctttctttgctgagtaatatttcatttcagggcagattactttttgtacatccatcaactgatgggcattgtgttgcttttgtctgtaagctcttaagaataatgctggggttttgtttgttggctgggttttggttttgttttgttgttgttgcttttgagggggtgttgtttgttttgtttgtttgtttgagacagggtttctctgtatccctgactgtcctggcactcactctgtagatcaggctggcctcaaattcagagatccatccacctccacctcctgtgctgggattaaagaggcacatcaactgtcacaacagctgctatggttttcgtgagaatactggtctgatgttggtgtttaagtatcacgtgacatttgttttcatttctcaggggggcatagctactggtggggctcggtgtttatataaccttcctgaggaaatgccagattgtttctggagagaactatactacttgtatccctaccaacaatgcacgtgtgtgcttctctatcatctggcaacactcgtgacgggcagtctggtgctctgttctggccatcatactggttgtgaagaagcacaccattatggtctgctatacatttctctggtgagttatggaatgtaagcgattgctctctcctgacactgtttcctgtactgttaaataaagacaatgctctcagaacttaaggaaggttcaccccatcccggctgctgcttctttctgtggagttccatgcttcaccaggcccagtacgagggccagcaggagtatgaatgcatgccaggcaggctcttcttcctcgtgctgaagccaagagactgacctgatgggcctgctttggtttatgtgcccgcctcctcgtctatatttctgcctcggcagtgtacaggtgagtaggggcattttgaaaaaaaaaatgaggtttttatggagagagaagtgatggccacaagtagccatctccctcccatctctgcacatcgcacagaaggctaggagccaaataatcatgccctgtatattgtcacggtgaacatttaagttttaattattcataaccacatacgacatggaagtgtttcagtcagccctgctcaggactcagcgaaagaccgcattgtgattgcggtgtgtcgggcttgtttaaataatcacttcatggagattttttttttcttttttaattccaggtattcatcatcagaaataaggaagcagtttacgctcccgcccaacctcggacagtaccatcggcacagcctcagtacctctggtttcccttctcttcagctagtaagtacgagttaaaggtcggtcggtccgtggtcagggattgaagttcccagcatctacctcctcccgccccaaccagccttagccaattctgcacctagcattgtctgcccactgctttggacctgtttgcctttacatatcagacatctccctctggtgtgagtagagtgaggcggcccagaactgtggctctgatgccctctgcttaggggcttgcaggctacccgaccatccccatcatagttcatatgtgggaagacaaggtagcctaggaactgaccactatttttagcatattttggttagaaattcttttaattgagaaatatcagaagcttgaggtgccaatctttcttgtgggataatttccttggaagtaaatttatgtactgtgaagttgatcagtttttaggatcatggttttgtgatcatgggccgtttatcagtcacttaatctcctcccagacagagtctagagcacttcccctcctacccctttgcatcccctcatccctatcccaggcccaggtggtcactgagcgctgctgtggttgtggatggccctgcctggaacttcacagcagtgaaaccattcacacaggagaacaattcttagtttcacaacacagcatatccccttccaaggtgcctacagtttgacagcaaacgaatcaactggtgagtgcagagtgcttgttacattatttgactaataatatgtatatcgtgttatttaagaaccaaaggccagatgtgggtcagggaaggcaaaaccatcctaaaatgagactgtatgtaacccaaaagtgggtgccgcttcctttgagcgagctgagcctgccctgccctcacttcctcatagagcacagcccacagccacactctctggctgatctagtggttatcttgagaaggttgggttattttttgtttctagttattacttcaaagccacttctgctcttagaaattttgtaaccttcccctgtttcctgtagccgccattttgtcgcctgtgacagtttacccaccgcgttaactgtgtatcctcaggtatgttttcctggagggatctgtggttatttcaggataagccttatgggttgtgtcattggtgagacagtaccaacaaatatgtagcaccttcgctgtgagaggtcaccttgtggtgacatcttttggagaaccctgtttaggactttggagcctttccaggcctcccccttttatgtcttttcctgcctgcttcaaaacttcaggttaggtaaaaaagcacaggaagtgcatggtgcccatgttctctgagtaagtaaaccgagacatgttacacataactttgactgggcgatttctgattcacattgtatttcaaagtgtgcacaatttggttgaaatgtggttagatgtgctttcaaattttaaacagtgtggggagctttggtgcctgcctccaacaagcgttaagagtgcagctctccataacagctgctggggaacagtgtggagagtaaagaggttttcaaggaggtttcagtccttgtctcctaagcagcctttgtgataacaccatgggccttgagttactgcaccagaagccctgttagatggagagttgcagcggaaaaagtgtgatgttcgcaagtgtctcctcagaagtttgctgtccccttaggaagttttgacaaaagtgaattttgacgagttacttcaatagctgggaggtcagattaacaagtggcttggctatgtgtcgtgactaacaagatctgaaggaagcgggaaggttaaaacgctagctgtaagaatcacgtctcctgctgttgtcattcaattctggtgctgtttggatatgactgttcctcacattttcctactcctgcttgtccccatgtagtttccttggtcttccccttccctgacttccagcttcagcacagtcttgaccctgtttcttctcccagtgggagtcaggatgcctggtctaccttctaaaaatctggggctctgtttagagcaagccagtgctctggcctcgtctgttctcctgtgatggtgtggggatgggtggctctgcctcatcagtagtcatcttctcagccgagactcccaggagaaatctccaagttacgaggtgatttccctttcccttgactctgtttcttttcctaaataatggaacatttcagtaagagtcacttttagcaaggcacgggagtagcttagcgggtaaagactctcaacctgctagagctttaggaaatattgtaagtcagaggctgcagtgtggattgctaattgtattattttggctaattaaaaaaaataaaacaatgtgtattttgactgtttgttttgctataagcaatataaccatttctagaacctcatacaaatggttgtttaaaaatatatatttagttgaagttcaggcatttaaaaccactcatcaagaggtcattgccatttgcaagagtaaagagtttgggatcagatgagcctaaggtggaaagtggttgtcacttattgtctgcataatctgagtcacaaacctctttgaagatttcagctccctctcctgcaaaactggcagcttctgttacctccctagggtctgtgtagaagtctacagtagcgcctgtgtaaatagtgggtaacattgttgccttaggtacttggcccggtagagactctggatccttaaaggtaagtagcagatgtttccaacgctctatttgggaagacaagtaatccacagggcccactctggcttcagatgtgatggacattcagaagaaagagctataaggtgataggaggcaaaagcttgctggaggagctaagaaagcccaggagacaggtctgacgagctgttagagacgcctggcttcctcttatacttctagccaggactcctgcagaatagcgaggttggcattccaaacacaattagcaaccaacactgttttaacattgagcaggatgttggcaggtccccagagacacaggttgagagtcacctaaagattcttagaggactgggcaaagtccaaatagcaaaaggcatctgcagagaggtggtttctttggttgccctgcatgctctgagccgcagatgtgtggtaagcaaggactgcatgctacccctgtaggtattcctcacaaagttcagctcttccttagatagctaataaatgagtaggaggctgaggcagtgcacttgatatggtcttctcttggtttattcagtttttttttgttttggtttgtcttttgttttcttggaattgttgttgttgctttggttgtttgagacagggtttccctgtgcagccctagctggaacttgctctgtacaccaggctgacctcgaactcagagacccacctaactctgcctcccaagtgctaggattaaggtgtgtaccaccactgctgggccagtttttgtttgtaatgctagctataaatgcctgctatgatgactgtgtgattaaatattttcaaaatagatgagctaccttttttctaaaaaaattccacttatcttgtgtgtgcatgtacacacatgtgctatagcatgccagtagaggtcagagttcaacttgcagaagcttgacctcttctaccatgtggattctggagactgaacttaggtcctcaggcttaagggcaagttcctttacctaccgagccatctcaccagctcagtaaactgcttttacgttttgcatgctctaataagaaggagatctatcatttagaatgagttttccagacttagatagtgtcttagatagtggattgggtctgcctgtcactcctgtcagaggccttttacaacagatccagagagacaggcctctggccatcccatgtcctggcctgagatgtacaccagctttggcgttctccactgtcacggacatgggagcaggttaaccagagatcctgtgccagccatctatgtaagcaaacaactctacccttgatgcttgaattaaaaaacaagcaaacaggggttggggatttagctcagtggtagagcgcttgcctaggaagcgcaaggccctgggttcggtccccagctccaaaaaaaaaaaaaaaaaaaaaaaaaacaacaagcaaacaacttgtaaattgtaaagcctttcctctggttattaaaagtggaaaatatagtaagtacataaatggtttggatctggctctaaagcagcaaggaggattgaagacctacacagcagttaataactttaagtacattatttaataaaggaaaatataccattaaaaagaaacagaaacatctgaagagcaaagaaagaacagccagatcatgatggctctgggtgaggaaaaggatgtaaaaagccacaccctgggcacacactgagcaccatggctacgggacctgtttatgtgtctaacatttgtggcttaaggatgtctcatgcccaagaagcattccttcttgtgcacacattggcttctgtgaaatacagtacccttctctttgccagctaagggtcacttgagcgctggctccctaactcctggcctcctttgtgcctcggatgctgttgttgttatttctcacttgatttcttccacagttggcagttctgtgttgttgattgtatggaagggacatggcagaaaaatgcagtgctcagtgtagtttccacacgcattcacagtgcagatgaaatcaaaggcagggaaggcattctttataaagagcaggcccttggttatcgtaagggatggaaacaggccggggagatggcttagtgtggaaaaagcttaccactcaagcatgaagacctgactttaatgcccacaaccctcataaaaatcatttataattgcagcaaaggtggagacaggagcgttcctgggtcacactggctagccccatgtcctagggagagcccctgcttccaaaagcaagacagatggtttctgaggaaaatttcaagttgacctctggccttcacccatgtgcacacttgtgaatgtgtacatgtatatctgacttgttaaaaaccacattggtggtcatggtaccatctcagcatctatagtggcatccatggaagatttctgttgctggaggcagggaagcaagcctcttttaggtcacaaagtactttgaaatcactgaaggcagaggaaacttcctgcttttagctttgttaagtgtagaggggtggctgtcttttttattcattgtttcctgggtcttactctgtacctgcagctgctgtaagagctgtagataacatgcatgaatataacaacgggtgcatcctttgttcttgtggaacattttagaataggagatgggtgtaaacaaatgaatgtcagctgtgatgagggcaggaagggttacaaagaatcaaaccggcaaagggagcggtatcacagatgggatgctgttttaggcagagtggtcttcgaggacctctgtctggaatggaaatacccaagaagtgctaagcatgagcccatcagcttgctaagagaaggtgttccagggagaaggaagagccgtgtctagcctgcaaggcaagagtttccctcatgccccagaagcagccaggaagtagagtgggcaacaggggagaccatagctatagtagcatcaccaagccatagctgagaacacaaaatgtccattcactcaggtaagaagaggaggttcctgggagcacggggctaggcaagcctgagatccatggagctgattgtcagggaggaaagcagagcaggctgggagcccatggctggagtggagctggtggagctgatgctctacttccagacctgagagagagggagagggaaaagggaagggggagagggagagacagagggagaggcagagagagacagagaggcagagagagaaagagaggctcagagaaagagtacacaggcacacaccctccctttccccctcctcctacctgaacaagaataatttacttgaaattgctttggatcatggcatttaaactaaggtctctttgttgtctgctgactaagaagacacatggctcaacagaaaagaggaagccgagtagtcaaggaaagacttggacccttaaaagccgaagagctgaagatacaatgtaactgctacctcacctcaggttcaaacttcatctcaggcagcacaaggagggcagctgttaactcttcagacaaacgtgtgtgtgtgtgtgtgtgtgtgtgtgtgtgtgtgtgtgtgtgtgtgtgtgtgtgtgtgtgtgtgtgtatgcatttctttctttctgtttgtgttgattacctcatggtaaaacctgctcatgagattaaaactatcgatattctagagaacagactcttggctatcatttgattgtttggttcctggctatcatttgagcttgccagaagaaagacagcttgaaggtctatcaaattaagataacttggaatctgcacccattactactggcaagacaagcatatatcacactggaacgagcagatgctaccttatcggtttctgtatagaaataaggagagaagttacccagtgccagctgatgtgttctagagaagcatggtctagcaatggctccatcctacagcttgagtttacagcctgccccacccctggactatgttcagacataaagagtttgcgtttattgtctgtttgtgtgtatttatggttgagaaggttaaacatcattatccaatggttgataagagggcagtcccatgccccatgctctctgtatcttagtaccaaattcagtagaggcccagtgagccattgcatatgatgggtcagaccatcgtctgcccctgatctttggtccatctgtcctgtaacagtttctgagcttccacctttatagctagcttcgactttcaggaacatggctgggcttttattttagctgggctggacttttttttctctcctcagttctcggtgctcattcactaagcataaatgtttcacaatgcatttaaagtatatttcattacctgggcttgagttcctcataatacacttacacctgtcattcatttatttactattatatctgagcatccaatctcctgagaagttgtgagcagaatttgcgggaagttgtaaatgcaatttttaacctgttttgatacacacttaactattagcttgtacttcagttattttaagaaatattgattctctggaaagcatctaatcaaaattatagtgattaagaacacagcctgagactggagagatggctcagcggttaagagcactgactgctcttccagaggttctgagttcaattcccagcaatcacatggtgactcacaaccatctgtaatgggacctgatgccctcttctgatgtgtctgaagacagcagcagtgtactcatatgcataaaataaataaataaataaatcttaaaaaaatagaacacagcctgactgtattttaattccagatgtgctatgtcctagccatgtgatcaatggcaagttattaagtcatctgaaagtgaggataattaacacatctgaaaatgaggatagttagcacatattccactggcttctagtgagactgatttgcagaggcccttcatgtactgtggtcccctcctctgctgacttcagctactgtcagaatcgggctattttcttgtcttcttgctacctgatgatcaaagggagctcttcgctctcagatcatcctgtaaccttctcctctgcccccattgcctctgccgacagtgagtgctatgtaagtcagccatctaaaagtatctgggccagaagtagggtactggatttagtcagggttccttagaggagcagaattggtagaataaatatctattttttaagggggttattaaagtcccttacaggctagtctggctagtccaacaatggcttttgaccgaaaggccaacaatctagcagttgttcagtccacaaggctgggttctcaactggcctttaatatactttggaatcccaaagaagcacgttctgattccgataaagggatgcgctgcagcaggatagatgaacttggcagagagagtgaagggcaagcaggttaaaaagttaagcttccttcttccatgtccttttctgtgggctgctaccagaaggtgtggcccagatttagggtgagtcatatgacctcaaatgatctggatttagaaggtatgtatcttcctatctcaaatgatccaatcaagaaaaacctctcacaggtatgcctggctgcctgagttttagttgattccagacatagtcaagttgacaacaaagacttgccatcacaggcaaagctcttgcttctctctggttagcaagatgttcctgtcttaggaaagggacagtgaaagccacagttacattctggaatgtttttgccctttgcctcttcgacagcactgttcctcctccccagcttaaagcctgctggtatgtgggctcaaggggatgaaaaaccagttttgtcagcctttccttcaggccagccctcccataggacaagtctggaatctgggacttttgttttgtgatgcttttgggattgaggagagcagcgttcacttgggctgagtccacacagtccacggcaaaggaacacctcagagggacacagcctctactgctactgttatttctgggccaatctccttgatctacatgtctctcagtgccttaaggcagttcctggatctttgcatagcccgggctagaagatgtattttgtttaataggggactggtaaaatgttgccagttcttaatactatcaactgaagagcaacattgtttcagttacccgggtttctagcctgtctatttcctcccccacctctatgggagtatgcaatgaagacccgacagttttcttcagcagatcctcagagtttgctcacccagattcagtcctgtgagtttctttcttccaaactagtagtttctttctttccaactagtagtgtttggaagtctcagccttacaggggtttagtcacaagcctggctccaggtcaatgtctaaactgctggtttcgagcagcagtatatagacatctcaggccaagggaaacactgcgtctgagctcaggcagccagaggagtgctgcctttgcctgagtttttggagaattgccttctttctctttttcactgtgtttgggtaaacaaaacatagcctcagagggcttttgcaggagaaattacaaaaattcctcaaagcctgtgatctcattttggatctcctcaggattcctcatcaagctgcaattaagcagagaaaaattctgccttggggtgtgattttaattactcatcgtgttgtgacttgactttctgctactgcctttctttacctctcctgtcagttgcagtttgacagcttctcctgtcgcttcatttaggctaaaagtgaaacgctgggttggagaggagggcagggcagatatcccccgcctgcatgcctgtgtgtccgtctacttcaccaggaagcctggtggaacagccctctccctccctttccctccagcctcagctgtatgagcccgttgagcctgtggactttgaaggacttgtgatgacgcacttaaacagcttggatgcagagctggcccaggagctgggggacctcaccgatgacgacctgcatgtggccttcacacccaaggagtgtaggactttgcagcactctctgccagaggaagggtaaattattttcttgaaatatgagaggggaagggtgctgattctgaacctctctttccttccttttttccttccttccttttttccttccttccctccttttctccttccttccttcctttcttcctttcttacttaaaacagggtcttgctgtgtagcctaagctgaactcagagtcacagccctcctctcctctcctgctcctgcctcctaagtgctagggtcaaaggtgtagcactctcacctctgaagtactcttgaaaggaagcaaactttggattggggtgggggtaggtatggggagatgggctacagtgcagtggaataatgcttgtctaacatgtgcaaggtcttggatttgatccctagagttacaaagaagttaataaattttttaattaaaaaaaaatttagagatgacatgaggacataagctcagatccccagcactcacagaaaaagcaaggcatggtgacgtgcttgtactttagtaagctccagggtcactgagagaccctccctcaaaactaaagagtaattgaggaagatacccaacatcttcttatcgcctgtacatgtacacacaagcgcaaacacgcatatacacacacaaacatacacacacatacatgtacatattttaaaaggagcaaaactactcaatccactaaaatatacagcacatataatattgctacccagatgtacacagagtttgtttgtttattttgtggtactgaggacctagcacagacctcacgcatggtaggcagatgtacacagtttctaaatttgtttagtcaaaggctttggaaagccctgtgggaactgagacacagtttaagggatgctgtggaacaggatgggacagtacaaaagaagttaagattacaggtcctagaattggactcctgggtgccagcttcatgaccataggtagtcacgtgacctcaagaagccttatggtctctatttgcagtgtcagcagtgttcatagcaagtattgaaatgcctctgtcagaagcattttatgggccagtaatggcttagcaggaaaagacatttcccagaactgacccattcaagtttgtccactgattgccacatataggtgtatgtgcacacacacacactcacacgctcacacactcacacatacacacacaccctctctcacacactctctcttacacacacacacatactcacacacacaaacatacataaaataaatcaatgtaaaagaattgctaagacaattcttttgtttgttcctgtacaaaggcctgaatcaaactagtaacttaagtttccatgtccgtttattgaacacctgttgagtcctgagagtaaaagatgaggaagggaaactcccttcctttacagaagtttcagatagaggagacgcagcagaagcattgtaaaatgaatattcaaataactctttagagctgagtgattaagcatggtgtgggcattagttctcaatggccagcaaccatggactcacgaaacaagcagccgtaggatgaacacccctgcctcacaggagatttcgaatgacttttgttttcattcatctttaaaccaaaatgttcccttgaacattttgagtcctctcgtttctcccagaaagtcccagaaaggagagtatgagacatggcgcctgccctcattgctctgaggtgtttctgtgtgagggtgtgtttcagcacaggtgtggacaactggaacgtgggaagtccctttttctcttcttgggtcagtttcccttcacacagcaagctagccatgcatgcagctccgttccttgtggaaaatactcgtttcccaaaaatcagatgatctctgtcattattggggaacatttgtcttactgtcaggccacttattcaagtgcagtttgaatattgacaacacattttcatctttggtagagctgtgttatttatttgtgtgaatatttatctttaaatttggccagaatcttagaagaactggtgtaaaatacaggaagcttagaggtagaagggcttttaacactttgataaagaaggcaggttttccaagagtcgtttggtgataccgttttgctgtgactcaaagggaatgtgttacctgtctgatggctttgagccagactgtgctatcgtagttgttgccatggtcttctgtaatgagcaaggcaggcagggaagcattctggttaccatgagagtaaccactcatgactctaagtgaccatctgtgcttcactcagaacctgtattgagtggtggtctgcggtagtcatgtactgggcctgcaggtcctggtttggccacttggtctacgacttggattaatgtccttatcacctcatccttctggataacaagaatagcagcagtgccttccctgttgaatccataaaagtgcttaagtctgctcagttcataatgatgtcacctaagtcataactagcacagagctcttaccatgcgccagacaccctttcaagcactttgcgtgttagcatcagatcttcgtcctgaaggaggaactctgactatgtcacagggttgaatgactggcataaggctacagaatcaatgaggaatggagctgggggttgggcagtcaggtccaagagatctcatatctagcctttacagaatttcatcttggactgacaacagctccatgggtgagtactgtcctgtttccttgtgtaaaccagtttccctttactgtcacagatatccgtgacaaatcaactaaaaggaaggaacatttattttggctcacaactttgacgatttcagcccctggttctttgggctgcactgctttggtcctttaatggcacagagtattatcatgagcgagtatagcagagaagtaacttgtgaccacttcatggccaggtgtaaaagacagaggaagaaagcagtgtcccatggtccccttcaggacctttcataagaccccgcatcctgaagagttaccacttctcaattatgtcatgccagagactaagactttaacgggtaggcctttggaggacatcaaagatccaaattttaccatccctgtttcctacgtgcaaaattaaggcttataacacggaagcggggagcccagaggcctcaaccctagataaagaactacaggcagctaagaaatgcagggagccagagaaataatcttgcccagggaagaacacaccaatttcttacccaataccaaagagccacccctgaaaacatacgtatacacattgcactatatggactgagacagttgtatttatcacatatatatgtacacacacatacgttataggtataacatcagttaaagaaaaagaggccaggagtttgaataagcaagaacgtgggagagcttggaggaaggaaaggggaaaataatataattatattataattgcaaaaatatgtcaataaaaattgtcactcttaggtctatttatgtctagtactgatgtgtttctcacaatgccgaaagctttattactgattgtttctgatttcaagactgtgaaacatatggagaatatctcttcctagcaggtgtgacaagaatccaaaacctatgtcttcaaagccaccaaagcccatggcagctgttcttggctttctaaatggaaaacacacatgtcctgacaaaatcacacaagagcaaaaaaaaaaaaattaagttagaaataactatttgaacttaattttcatgtttggtgtttgattatagctgtgtctccctatgagtgtcttaatgccttcaggaatagatatagtttagcagttctctgtaacaaagaaactcaacaatgtataaaaggacaacatatttatttagtgaaaacacaagcatcattgccttagggatactttatatacttgaaacaaatgggcaagaacattcctaacattcttattgatacagattcgaaatggcattgagtcccttgattatggaaaggattgattttatcacttttgcccagtaataacctgtttttgtcttatttttcacctaattagagttgaactggatcctcacgtcagggactgtgttcagacctatattcgagagtggctgattgtgaaccggaagtaagtttatctcctccttatatataaatgctaatttatataaatgtaaattttacatggttagtgggttgtttttcacgtgaaatgactttttttgggggggggggtttaaggttacagaaaaactgaacagaaagccttgagatctcccacatctcccctcagagcatcgctcatgctaggcacatactgggctacgtcaccagtcctggcattggttttttgagctatatatttcatggcttttgacaaatgcatgacaggcttctgcccttgcagcatcaaacaaaagggctttcctgccataagtgtcccattgctccacctgtctctgctcccaccctccctggtctgttccagtccccttcacagtctttgatttcagcttgcttcctcttgtcccctcgtggcttcatcccttgttttctgttaccactgaaaaaaatcttgcattgtacagctgtactacagtcttctgtttattcagttaggaagggaatcatattctaagcatgaagaatagagtcttctttatagatgttataaataagtagagttagccatgcatggaagaacatacctacagttacagctacccaggaggctgaggcaggaggatatttgcacctgaacgttcacagccagtctgagctgcatgacaagaccatgtctcataaaaacaagcatatttttctctttttttttattttgatgaactcctagagaaaagatagttaatgaattgaaatttggcctcagatcaaagatgccattagaatttgtgaccccaaaacaaagtagttgctggtcttccgtggaaggcatttttatccctgggttaatgaggcattttgtgaattgtttcggaagtttctgtctccatggtaatgaccttcacagcacagtctcatgagaagcatttgaacacacagaaatccataccatgtgtgcatggacacgtatatgtgggtgtgtgtactgggaagtaggtggagggtgtctacagattgaggtcggaggcactagatacatgtcagatacgctctgagacctaagcagcttgcaaaaggtagcatccccctctccctgcgctactaggaattactgttctcggggataaatagtaagactcttgacactgggtttcatccagttcctgtaagtgtgctattgaatctgtgccttctctttttggtaataaaagtatgcattctgttgctagtagctgcagagggaggagagtcactcagagacagtagtgatgacagagctgcatgccagccctgtccccttagaacacaagtggaaggcagagatggccagccaggcaaataagactatgcagtgctactaataaatacaagttgttttcagactctaaaatgttatatttagaggcacttttctgggcatctaaagttctaaaaaagaaatccaagaaggaacaataaacagaaagccccattggactgaattttgtcttcggatttattttctatttgaagccctgtccttgtccctcctcctgctagtacaggctctccgggattcttttctaccacccacagatttgattttatttttaaaaaagactttagaatgcttgtggtagaaatttaagaaactgtagagaaacaaaaccaaaatgaacggatttcattcttggtagatagccatacttgacagtgatggaccagccttgaatcaaatctctttgtcgtatatgtttatataaacactacctcaaactctagtgctatattttagcctgaattttcagagtaaggaaaaatttcctgtcttcattttcagttattcttcctcaacacagtaactaatgattgcttaatgaatgtatatcacatgtttctcctatttttttttttttgcttttgtacttaagttttagacagtacagcaatgtccttctccctaaaaccctgtacacattcatgattttttccctatggggaaaacctataatttctatacctaagatataggcacaaatttaagacttaatagtagaccagagatttaatcaatacatgaattaaatgtcaaatattagcaaatataaaatacaatacttcattttgtaaaagaattgtgatttttgacattctttgattatctgattgaacatttttttctcatgtttttgttggctaccagtaacttttttccttggcgcattacttaagaaatttgtacaactctactgaactattcagtttcgtaaaactttagataacttttttaccatttcggggcagtggtggtgctcgcctttaattccaatacttgggaggcagaggcagttgaatctctgagttcaaggccagcctggtctactatgtgagttccaggacagccaagctatacacacacacacacgcgcacacacacacacacacacacacacacacacacacacacacacacaaacctgtttcaaaaaacaaaaacaaaaccagaacacaaacaaacttttttccctttaaatgttgtgtgtgtgtatgcatgtttgtatgcatgtgtgtatatggggttgtgtattcacatgcgtgtaaaagcacaaggttgatattaggtaccttccttgattctttgttcactttattcattgaagtagagtccctcagtcaagcccagagtttgcaaatatggcggtgtcactagcttgcttaagggatcccctgtcctcacctctgaggcttttagatggattctggggatccaaactttgattttctttcctgcacagcaaatactctgattgctgagtaatctccccagcactattatttaagttaaatatattaacctttctaccatgtaagttccatactcagtctatttttaaaagtctttatattttaatatttagaatgagttatgtaattaaatccacattggtattttccttaagactttttctcttcgttgtcatggttagatgtctggttttgggctaaaccatgggtcttgacctttagccactggattgctgtttctgcctcctccatgtcccgtttctttttcagaagcaatgattgtccatgcagttatctcttatgtaaacattatctgcttctgttaggtcaagcagactggagatggggatcagcactggctgacttcttaccacactcacatcatcgatgagtttccttccccaaacaagctagtgggaggagataagcctcctactctaacactcattggcagcttctcacagtctttgactggtgtcttacagaagggcagtttttctacccctacatttgattttctgggactgtgaatctgaaatgctgagtaagaaaaatatatttctcctactcatgttcttccaacacacacctcccccaggagtcattcgttcgctgtgtgtacccataatgctttattcatggggaaaatccaggcacccttcatcaccccactcctgctatgttttcaatacagcttttcaaacaacacatttatttatgtattctttggtaatatatggtcaaatatatatacaatataactagatcatatccattccttattccccctggatgccttcccccaacaaataccctccaactctccttcctttctttttcttttcctttttctttttctttttctctttctctaattaccactgggtccagtcagtgccgatggcatgcacatgggtgtgggtggatcaaccagaacatgggtaatgtcccagccacaacacccctaagggaaaggacactctttctcagcaaccatcaactacagtagcgtgttcctcagctaagagggggtgcttcatgagccccttcctggccatagcacagagaagtagctcagcagttaggaggacttgtgctcttccgaggacctggttaggcatgccatggccactatgggctttccaccatccactttggtatgcctgtcattgtcagctcatgttggggaagtcatgttggtgagacttcatgggagtaactctgacattactaagagatgacatttcacagcaaattccatgatcctctggcttttcaagtcttttcacccacccccttttgaaacgttccctgagcattaggtgtgggagttgttttgtagatatattcattggaactggacttccaaactctgtgttttgattggttgtgatttgtgtccatcatctccctggtctctacctgtagtcttcatatctcaccaatgtctgtctttttgtaagttataagcatacgtcatagttttcaataatatctttgagatcatcttgtttcagagaactaggccatttttttttctgccttgatttcctcagaggaaaggaatgtcccaggagctatggctctttctctgttgatgaatctgtaattgtttcttcttcccataatgaaaaattctagaacatttgttctacacatgactgtgactgtttctgaaggtagaaacgagacccaggcatctaatatgttctacttctaccaaatcgttctccagaaacactctgctaaaacacttcaggatcagttcaacatggagctacccctctcacccatttccttgccgatgttgggtattattgataaaaataagctacatcccccagtcttattttgttgtcatttaaaactgtgggctgttattaccttctttctgaatgctcgttcatatatttagattttattccctcggtctaaaagcccaactatgtatacatatttatgtaaatataaaatatttatatacgcacataatccgagtatataccacaaagtcccatctctagggatttgactaactgaaacaaaaacctatgttcacataaaagtctttatgcaaatacttaaaacatttttattcgaaggggccagcattacaaataacactgaatgtattcaacagggtaatgagaaaacaagctctggtaagtgcatgcaaagatactgctcagcaaaatgatagaatttataaattactgcgcagaaacaccagattcattatgctaagtaaaattcgccagccagtaaataattccagttacatgacattctaaaaaaaacaaaaaacaaacaaacaaacaaaaaaaaagtgaagacactccaattagtgtgtcaagggaatcaccctcagactacaccatatattttcctgagctttggggatgggtagcagcctgctttctgcacaggtctgatcttaatgaagccattttgccttccttgaacacgtctttgccatttaaaaccatgcagtcaagcattgatctcgtcagctcctttatccctcaattatctcctggccgctattacatttctctgtagtatctagagatagttttttatgcccttattctctgaggtaatggctttgaattccacttaatgggcagaggtgcggggggtaatggccacttgcactcctccccctctcatcatcccgtgggcatttgccactcaagtcctgtcgttggcatgtctaaatcagatagataggggtgctgtgaaggacgaaagagagatccaggcttatttttatcactcaaaagggaaaggttgagttatgtaaaatgcagggtctctttttgtagaaatatattcacttttttctgtttttttttacatgtgtgcacatgcgtgtgtctgtgcctctgtgtgtgtgtgtgtgtgtgtgtgtgtgtgtgtgtgtgtgtgtgagtgagtgcatttgcgtgcatacacatatatggaagtcagccagagcaacttgcaggaagaggccctttccttccaccatgtgagcccagggctttgaactcaagtggcgtggcttagcagcaagcgtctttacctcccgagctacctcacaaacccagaaaatatattcttttccttgaactatttacctgtgattcttacactacaaggactccttggatagacctctttctacgcttcatgcctgcactgccacacttttgtgaggataacaggtttttatggcctttttgttttgtgtgctttgatactagccatagacacaacgatttgtgtggggttgtgtttacttcttaccctggtctcatatgccttcataattttttgtggacttatgtttgacagcatcctttgggcgatagtagggattttaaggcaattcattttctctaaatgaagctggggtgattagcttcagagtgttttcatgccttggtggtgagtcaaattctccagtgattaaatgtgtttacgtgctatttattttcggtgcattatccatagcgacagtgaaacatttcatgggtgttacgggcagcatcataaaagtccctggactttgtctttcatcccgagtgattaaggcgattctgcaggaaggtcacactcaaggagagtggggatatcaaggaatagggtatcatctgctttattgctccacttttactcccagtgaactggtaaacaattaaaaactgaacacatcagtgcatataattcagttactcccaaaacaccataaaaatgtctccctgatcaataattgcttattacgacacacatttgttgtgcgggctgtcaaggtgctctgccttcttaaagcataaagagcaagctgtgctcttcgccctacacggaacaagcagtaacctggctaggaacgtcaccacagcctgctctagacctccttcatggaggccccggtcaaaggcttctacccagccttccctgccgtggccagacactgtcacagccttctgtgagcttttaaaacctcttgacatttctctagaaatgcccgttaagttctagttgcctgtgtcttccccggtaattgtggcatcttttattgtagaccgaattcactggggccaggtgctctcagccgcgtgttctccttggtaccttattctcaagagaattaaagttataaacatttgcctgaaacagaccctttcagggctttgtagcatcctacaagtggaatgctaaaatgggctctttgcagagctctacctcctgacatctaagtgcagatcccctccaaaagcaatgccattctgcagaaatattagaagcctttaagttcaatgtatttgtgaagtaagcgtctggacttagagcacattcattgacatagcacaggacagtgttgtccctgatgctaatggtgacagctagcacataactgtctttgttgccaccctagaagcaggaaccatggcagggattctgatgcctgtgtccttcaagagttggtctttagaaaaagtctggggtggagtctgctgaggatggggatgggtctcagatcatatttagccttgggctgcatcagttgtgaagagaaaagccagactgtatagttgtcccactatcctactctaaagtatggggctattgtattccaataccaatcgttataaaaccatgcagccataggttggcatgggagcccagaaggtcagatgagttgacaatccctgtgctcacagcagctggagaattatgcatgagttggtaaagggcacttgattgaggtcccagtagtttctaccacagtgccaagtgtggcacactgatttccttctatttagagacaacctcaaatttgtagaaaaattgtaaatctagaacaaagacctcctcctccttaccactaatcatgtggtaaagactaaattcactaccttatttccccatcacgctgcctacattggtgagtaatggttacaaacaagtacatttgccgttatactgttgccatataacccccacattctgtaaataaatattaatatttcattaccactaatcttcagatttcactttctcatcaaatggccaaggaatgttcttccaagaatctcgttccaagttgtacacactgtgcttatgtatcccatacccttagccttactcatgctagaagaccttctcagtctatctttttacttctctgccttatgaaattatgggccagctattttatagaatgctcctccctttgggtttaattgttatgatatcccactcctcatcaaatcttcagtttatttctatcaatattgatctataatttcccattttattgaactataatttcccattttattgagtgatttaactcctgtctgttttattttgatgttcaaatggtcttcagtttgattggagtcattctctttgacccttacatctttttttttttacatgtccccagcagtcattgatgacattcttgctctctgacacaagatattctaggaactcttagattttcccttcctcctcctggaattagctgtggctctcagaagccgaatgctttagtggactgtgctactcaacagcggatgaacatgtgttaggtgtgctcatatttactgaggtgttactcctcacatcctgtcagtgaacagagtggaaaccatgagctcctgttgacacagccatctgacttcacagcaattgctctcgcattctccctttgatatttaaaccgctttatttggcaaaatatggctcctgtgtccaccatgtttctactaagttgtctaatcctcctatgtgtacccatttcccatattctcctccaccccagtcagcctcctcctcctattctggttctgacgccaggcttcccatgcctacctagatgagcctcttcttgcactgacacaataccaggatgccccttggtacttggggccttgtcaccgagcccaagcctgacacctcatgtcgagtgtcccttcttataattgctcctttgttagactcgggctcagtggtgatcacgctcctggctgcccaggctcagatatctgccttgcaccatttgggctccagttcacccctctgtaagggcagcactctcacaaccaatgcgtttcctaccctatcctggattccagttccagctccgcttttcccaggctgccctttccaatgcaccttaaggttttaacctcgctgtatagggagagggggaaagatgggggaagtgtttgagaaatgggaaggaaaggaagacggagagagaagggacaagagagaaaaggacactattattctctgaccctcacaatatactcttaaggtgaactgcggttgcccccctttccacacccgaggaacctgtggctcagagacatgaggccacctgcccagatctgtctctcttgacgaagtaattcacaaggagccagcatctaagttcaggcctctctcactcagccagatcctgccagctgcacactctggcctctaaagagaatgctttcaagaagtctttggttttgggatgttcctgagtgtgtaaaaaaggtgtttaagaccgagtttggcaaacgatggctgtatccatttcacgtggacagttgttctcccagtctgcctatttccccatcttcctcgtctcttcttcacatgggctcaatgggaacttggctttgtctgagtcagttgccagggtggggtgactaggctgagatgcctgtagccagaggcactgagccagcggtctcactacctactcagtggtgactccttccatgctggcacttctggagtgagtcacctctgcgcttgccagcccctacctctccccagccaacactacccctgcttccaagaagaacactgaacactgactttctgagattttttaggatggggaagtggatgccaaagggtatgaggaaggggagaaaagttttctgactccaacatgggcacaacagtcttactgctttccaaagaacaagtccccgaggctgaagtgtgtgtgtgtgtgtgtgtgtgtgtgtgtgtgtgtgtgtgtctgtgtgtctgtgtctgtgtctgtgtctgtgtctgtgtctgtgtccttgctcataagtaaacactcttagaaatagatgtaatttataagatggtggaaaaggcaagctagcagagtgtagtcctggttgctaagatagcaacaccgtaagtctttcagctgcttccccagttgtttgtttgtctgttttttttctctgtaacccaagttttccttgagcttataacactgaaccttcttcggagtcagttctctctggagagaatgggtcctaaaaagtaactgcagacaccatcatggagagttagaatagattcagagggattggtgttcgtatttggtctttattttttttttctgctccacatagggcattaaagatctaataactacaggcctagtgtatcctcatttgggtctaattgcaagacaactcttatttgcctatatttgccactactttaatttgattatttcctcttcctgggatatcagaccacccaccgtgtggccaagtagacatggtgactagaccactctcagctttacttttatcttctcagttatttatttgtgagtttagctggttaggaactgctcacagggtgtgcccagaggctacaagacaaccatggaagttcctctctctttcccttatttgggttccagggatcaaactcaagccataagtcttggtggcaagcaccattacctatgagccaccttgctacccacctcgggtttcttttttcctttacacacaaagaaggtcctgctatccccctccatgtgactccctagacttgttggctgagaataactttcaagaagttgccagatgtcgattatttataattcactcttcatttactcagaacaactgaaactaatactcactctctctctctctctctctctctctctctctctctctctctctctctcacacacacacacacacacatttcatttttgttttcagatatttaggaactccaagtaagaaattattatagttgtttttcttgatttttttctaagtatttatccttattcatgtatggccattttcttctctgttagtgcctcattcagcctgctttttgcccagccttattccttattacaatagattgggccaggcacagaaatagccaagtagcactgaaactggccagtcatagtaacccagacttagaatagttgccagactgcccttacagagagcctccaggctttttgtctcttttcctcaaaagcttttttttttttttttttttttgtcttctgagcaagagaagccctgccctggcttcccagcccaaggtgctggggcatctcctgcctccttaactaatacagtgaaccataccttcagtacctgctgcgtgtgcctctcttcctgcaatgtccctaccctttcagagacttataaagggcgtttgaatcactgctggcttcctatgggtctctctttacccataggccatttgagctgcctaatagactctaacccattcatgtccctttacagcctgcacagcagtctttacagtaaaagcagaaagcacacaaattaggtgtgtgtacactttgtagcatgtttaccaagaagcctttcagtcagaaaaatagggaatgtccatgttggttttgaaatgacaaattagagctcttgccctttccgtcatggtcttacttcttcagtgagtgccttgaccgttctgtttttagactcctctgagagagagagagagagagagagagagagagagagagagagagagagaggggggggaaaagagagaggagggaggggagggaaggctggaagaggggaaggaaggagggagaagacagagggagggagtgtgagaacacacaccaatgaatctaggccctcaagcatgctgggtaagagcttgaccactgacactgatctatactcccatccctctgacagagttctcctgaagtttccagagtaggcctgttagcaaagaatgttggtgcataaattattttttttgtatttttccttagcggtgtcctgcttttcttactcattaagaacattgatgtggagttgaaatggcttcttcttttttttttttttttttaatcttcacacgctctctatttgctgcttctacacattgctagatttagctcagcctcttacactgcagccaagtgcccacagctgaagtgaccacacctctacaagtggcattttcccaggcgtgcctgcctttcataatgggccagccaggaggccggttcatgcttacaacggagctttgtgtgagggctgggcgcgtagttagatggagggaggccttacaaccgtcctctgtgcagcctcctccactgcttccccgtgtctttatttttaacctaatgccttgcctctttctccctctctcccattccccatctccctccacatcgaactgtgtcaacaatgaaagaaaccaaggaagtccagagttttgcagcttcagaaagactggatctcgcagagattttcacaagacgcttcagaaacagacgtttgagtcagaaaccttggagtgcagtgaaccggccactcaggtacttcctgtcagcaaacgtggttaccaggagacaggcggctctgcccgaggcatgctgtcaattttttaaaaaaaactagagtaaaagtcagactcatgaacattcaagtaggaggaacttttttcaagtaccattgagtcagtgactattttcctcaaagtggtttatagctagctgcagaaactaggattcaaataagaaccccaaagcacagtggttaaaatggaaaaagtgaaggggctgtagttggggatgggaccagcagttggtcccaccctgttagaaccaggatgagtcagtcaaaacttcaccttcagattgcctgacctttcttagtgatcattcatcattagcctctctgggttttagttaccttccctggaaaccaaggatgataactgtgtacctcacgagatggtgagtattgagtcagaagtgtaaagattttgccagcttcacttagtctccagtaaatgctggctactgttattgctgttccaattattttcacggagtggttagagttgattcgttcaatgctgcatatacccatgtccacagaaacattactcccagtagccaaaagatgggagcaatcaagtgtccattgtggaaggatggggcatcaagagtggttgcctggcaactggggaggactgggaagttagtgtgtggtgagtacagagtttcagtcttgcaagatgtaaagaaccacatggaaagtaaggacggctgctctatagaatgaaagtccttaactctgtccgaagatgactgagatgatgtttaggctgtgtgtattttagaacagaaatgtagaagaaccagccatggcacactgtttttaagtcagtgtgcttgtccgtcgagctgatgttgtaggtaagaaaccagacagaggtggatgggttcccattgcacctagaagctgtagctgagactctgtggtttctctttgacgcttgctcccatagccattagtaagaccctgtgacaggatcccagcccctaagaccctgtgacaggatcccaaccccatatttctgtatttgcaaacttaacactcagctttaaagtgtatttacactttttgaaggctccttagcgttcgtcttaatttctagtctagaagcaagctctgaagttgattagaaaaatgttctccattcgaagtccaggctatgccttgtcccagctctgtctgtttgctccagcctgagacttgagcaaggttcccaagagacttggctccggccaataactgataggaacacagtgacgctttcacatccctgctcaggactggcttatgtaactggtgagtaatgacttgcttccaggagagaaagagcacctcacttcaggatagtcccaccagaaagccaagagcggtcttgtcaagacctcagtttgttaaaacaaaacaaattaaaccaacaaaaatcccttcagacacaagaatctgtaggccccagcaggagcagtcttgagacatccctgagtctagttctcattgacaaatgaaatccctgtccctcatgaagaccgattgttttctgtaacagacgggaccccgccatcgcttcaacgtgctgtgtgatgtgtctgggaagggccccatcacttcttgtgacttcgacctccgcagcctgcagcctgacgagcggctggaaaacctgcttcagctgagtgctgaggactttgagaaggagaaagaggaggcccgaaagaccaatcggacggctgagctcttcgccctctatccatccgtagatgaggtgggtacaggttcccacaggagcggatattggtgacaagggaagccaagtatttttctgctctctgccactgtagaacagcgtggagatcagattgcttactgtgtggctccctttcacttaagcacacttgtataattggagagccatttattgatcatcatattgatggaattcttatagcaataactagaattctcatagcacttgaattttctgaacatttcaagggtctgtgtacagtataccactcagagccaaccatccagctacttgggggggtgtttcataactagcccaacagaaacactttgttacttaaagcttggtgttattaaaggctttgttaagatttttcccctgtggccctaatgagcaagtggagacacctgctttgaatatgctctgggcagagataatcacagccatgcccctagtgtgtgaagctttaggatcctgttttcccagctctctctttactgaatttgcccagagcagtttagacgtcgtctgcagttatttgctggagcactttggatgacgtgagagtagccatcattcaacccttatgtgctttgactccttgtgtgttatgggctcttttcagcccttacttttgtttgtcaggatccctgcactccagatctcaccagtacagacagccactctgctgttcatgttttatataaagttcagttacaagaaccaagatcatgggactggagaggtggctcagtgcacaagagtgcttcccaggcaaacctggagaactgagtttgattccccagattcacataaaagtgatgggagagatcagatgccacagaatggccctctcacctccacacctccacagaatggtcctctcaccttcacacctccacagaatggtcctctcacctccacatcctcacagaatggtcctctcacctccatatccccactgaggcacaggcctgcacaggggtcctcatataaacacgcatggacaaatgataaaaatgaataagatttggggaaactgcatcgaagataatgtacctgtctgtagatgtaaatctttgaagtttggtccctggaccaagctagacatcagaaagcctgagcctgctcctctgtggctgctgctcctgtgacttcttggcttcccactcctccccaccccgctccctttgatttactccccactgccctgtaaggagacctgaagcagcaggaaggagctgcagcttcaagtccactgtggcagtgtcacacaggacagtggcctgctcatcatccagccccacccctaggaggacgtagagggagatgtccctcaagccctgaacatcccttgcctggagtcacatttctgatgaccactgagcagggcagcttacgtttatgtgtccccagttgcttctcttttgtctttattttccactcatcttggtttcttagctatgtgtcttagttgcagtttcttctgaagcagattaaagataaacatgttgggacaaggaagacggagcatactggtggccagagttccatccccagaacccacatgctggtgagagaactgacgcctgaaggttgttctctgacctccacccctcctgcccccagcacaaacaaatataaaaataaatgggaaagttaaagactaagccgatacactgaaaaatagattgctcatcattaaatcgatcagtaggtaccttggggctgggagacagctcagtgggtaaagtgttagctgcacaggtgtaagaaccccagcacctacatgaatgctgcacattgtggcgtgtgtctgtaaccccggccctgggcacagagacagacggatcctggggccaatctaaccacaatggtgagttccaggtacacacacacacacatacacacacacacacacacacacacacacagagagagagagagagagagagagagagagagagagagagagagagagagagaaaacagacagacagacagacagacacccccacacacacacgggacagatgtttttttcttacatagaacacataaaaagtatttcataaagagaaagtaaagaggaactaattaaaacctgtgggtagacagatagggagagatcaaaacaaagttttagttaaactagaacactgccttttactttgtggtgaccataattaatgctatggtagtgtacatttttaaactgttcataagagtaaacttaactttctcaccaccaagcacaatgataaatttgcaaggtattgtataagaatcttctgctgctgggtggtgatggtacacacctttactcccagcacttgggaggccgaggcaggtggatctctgtgagttcgaggccagcctggtctacagatctagttctaggacagccagggctacacagggaaaccctgtcttgaaaaacaaacaacaaacaaaacttcttcctacagtgaatacatacgatgtctcgttttatcccataaatataattttactatcaatttaaatgtttgttttaaaactaattacgaagaatttgggcaatattatcatcaccgtattttgaactaggatctaagagtggaaacatttaagcaatttcttcaggatccagctgttgaactaaattataaatcaggggccttaacagtctctgtgcttgcttacatgcctgcatacaacaacctggtcacagcacacactgttaaaacacagatgagttcttctaatgtttcaactttattcacattaagactttaaaaaatcagatttgtcaagaaatattggatctgacagatttgaactttactttcttgctttctgcccatctccatgatggagacactcagtgtaacacaagacagtaaagtggacattgtatgtgagaagaaggtacaggaggggacaggatgactcagacactcaccatctccctggattgagtgggaagatgttcaaaaaatgaaccgtaaactgttgtgtagagctttgatatttacggcttttgagacaatgcagaaactcagatgggggctgaaagttatatcttacctgaggtcccaatggctgcttttatggaatggagaagaacacggtgtaattagcataccagctgcttgtaaactggaatgtgtaaaatgcttgagagcctctacaccaccctttaatattttgaagttattctcaaagaaatggcatttgtgctggtcacttgaactttagccgagaaagacctatggaacagaggtgaattctgcccgctctaaaaagattataaatgctgatttttttttaatgacatgagattattttatgttaccctattttatttcctagtaaaaaacattagaagggcaaactcttttgttgagaatttaagagtccatagaaaaggtcaagggatttagctaccaagtcgtcagcatgcaagcccttccctaattcagactcatcctgcaacagacatcctctgtgttaatccttaggatggcattgtccagcttcaataggaggaaaagcccttggtcctgtgaaggctcattttcccagtgtaggggaatgccatggtgtccaggtgggagtgggtggatggtagtgggagcatcctcatagatgctgggggaacgggagaaggggatgggaaaggggataacacttgaaatgtaaatacacaaagtatccaagaaaaataaaatttaaaaaaaatgcccttcttttacttcacatcacagagtagtctactgcatagtctgttggttacacatgatggaacctaactaaacacgcttttaaacagaggaggagggtactcactggctctcataacaaaatcacaggagtcagaagtggagttggcactagattaccagatccatagcaaatggaagatatcatgctttttttctttctccctcctgtctcttctcttaatagaaatgcatacacatatatgggcaaacacatagcatttatattcctctatatacacataaacacacacacacacacacacacacacacacacacacacacacacaccaggatgaggaaaacctcaggaatccactcaattaggaagcatcccatttccaccttctgctacttgggacttatctcttatttctggtacatgtgaagcctcaataaattcagacacaagaagcttaggaaacctgacttagcaaactgatacaaagtattttgtgacagtaaaagatgggagttaaatttcaggtcaacaatgttactactgatgttttaaagtcgtcccccccacccccgtgtactgtaatagttacatatgaaactctctgatgtgtggggacttgcttctaagtaatccaatattaagtgtggggaacagacaagggagtgtaaaggcaaaatcaggcagcctgtgctgacattgttggagccaagtgaacaagaatagtggttcccttgactagtgcctctacctctatgtgtttaaaatttcctcaactaatgattatttaaagaatattctcaaagttctaattcaaaccaaagctactattagaaatactaaatgtgatgtttcctccagaaagtgggtctttcctgcagaggtatctgctctggtaaccttgacagtcccagctttctctataggagcccagctcacctctgctgagggcaagtcagtagttctaccagcaaaatgcctctcagtgggtgctggagaggaggagggtggtggtaagtttactacttggatcatcccaccaaactaggtacagaggtaaccatgaggtggcaagtgcttttgggaaaagtgattactgagctgtgttggggtgagagaaccctgaccatttattggtcaggaaaagacaagagacaatgacccagtgctttggcttcctatgagcattagcccatgattctacaccagtagggtaggctagcctgctgtgagagtgtgaattaaagcttcaaaattgcatattatttgtctttgcagaatagggatacagttaacatggtccgtggcacagatttaaatgtaaagttgtgatggaacttgatggctggtagctcttagtcaacacccagttgtcttacacctagaccatcagcatatgttagctgcgtacatgcatataacttataattcaacttcaaacctatttaagatactaaaaaacaaaccaagacaaggctctattataaatattgatagttattttgactcaaatttcaagtctgaaatctgaaatttcaagtctgaaatagacagcaaatttatttattaaaactcttgccaagaggctaggaggatggttcagcagttgaaggtgctcttcaccaaacccaaggacctgaggtgatcactggagaccacaaagtggaagaagagacacaactggaggtttcctctgatatctacatacaaaccgtggtgtgtgtgtgtgtatgtgtgtgtgtgtgccacacataatgcacaaagcaagcaagcgcctccccccccacacacacacacagtaaatagaaacacgatatacaaataaaaaacttggaaagagaagtggttttttgaatgtgtatttacagcttcagagcagggaaaaagacgagccacaaatttttgcaatgctgtctggtagatgttactaagccatagctatgtttccatgtctttcctccgtctcttccttctttccttcttcgctccctccctccattcattcctccctccctccatccattcctccctcccttttccctttctctctcactttctcttaaatgctccttttctgagaggagaacatgcttgctgcacctgctggctttacatgttggcaggtggatggcaaactctcttctcaagccagagcattattctgcagctagaagtaaagcagggacaaggagggcagcccttcctcccctggcttaactccaactacgaggcctgatgggcagtggctaacgacttctttacgatgtgactgttaacaggaggatgctgtggaaatccgtccagtaccagaatgtcctaaggaacatctgggcaacagaatattggtgaaggtgctgaccctgaagtaagtatcagactcacagccactccactgatgtccaccttgggtttagataaaagctaggccgcatcatcagcactggggtccagaggattctcccagcatcttttcaacagagggagacattggggtaatggaaagaccagagattcaagttgactccctggattctatttctacaaagcctttaacaaacagacttctataacatggaaatcgaacaccgggtgtctgggaaaattaagtgtgttagggtaattattgattttttttctttttttcggagctggggactgaacccagggccttgcgcttgctaggcaagtgctctaccgctgagctaaatccccaaccccaattattgactttcttacactaagagaaataacagtgggtgggatgtgtaactaggtggtagaatagttgactgccgtgggtgaatttgagacccatagattgacccctgtcttagactgggtcactactgctgtgatgaaacactgtcaccaagttgggaaggaaagggtttattcgcttaatgcttccatacccatcactgaatgaaatcagcacaggaactcagagagggtagaaccctggaggcaagaactattgcagaggccatggaggggtgctgcttactggcttgctccccatgctttgcctgacctgctttcttatagaaaccgggaccaccagcccatgtatggcatcacccacaatgtgctgagcccttccccaagcaaacactaattaagaaaattctctacagtcttgcctacagcccgaacttatggaggcattttctcagtcggggctctgttctttcagatgactcccctggttctgcccttcatcatgtgccaatacactactcaagcagaaaccagtgctggctttgttgtatccattcactttagccaatcccttggggtgggtatcagggtctcccgttgaaataaccagcctataaaccagatttgtcttaagtaatgggcacagaaaggcaaattctagtccttgcaagtgaaaaaacagcaggaggactggctgaaagagcttgttccctctgttcagaaggtctgcaccagcccaccacacctacccccagtcgattaggctgtcagatgcagtttagatttgaaagtagagaaacactcccccaggctaattgtcacaagccttccagactcatctaacacataaacccgcagcagctgttcttacagattggaaacgcgtcctgctgagctacagatgaattagttaaaaaacatggagtcacttgagtttctttcatgagaactgtcaagtcagtttctagtgatgttttcccagctcctaaaagagggttaaataaaactgatgtatgtagccagtgcccttgttacatacatacatacatacatacacacacacacacacacacacacacacatacacacatacatgactttggcatgttcaagtgacttaaatgccattcatattatttgtacatccataagagaagaataaaaccaaagaaatgatcctaactgtaaactggatgaaagaaagaaattttagaaactttgtaaaaatatgaataataaaactaacaacagtggggtagacgtgatttaccgttgatgtcgaaaaacaaattctgctcataagaccctagatttcacaagctaggagatccctggaaatgtattcacctctgtcaccattcctgctttgcttttgagaaatggatagagccttgagggcacaagaaaaagaatcacagcggtgccaattctgcaaattctgaatagcaagaaaaaatggtgaccacaaaatattttcctgttttataattcatggggggggatctttaatttcaaatttaataccatcatgcaaaatgtaaccttcactcagaagactgtctttaacatcaaaattttaatatacattaagttgagccaaggagtggtcttaatgtaggtttgggagacgtcctctagccatttccctgcaagggattctgcctcagaagatcccaggcagatccagaacctctgcatggttgcctcaaatgctggtgtctgaggaccacacctggaaaaacagtggtagaaaaagcccttgccctctactcaaaagaggcagcccggcagcctgcccctgaagtcctcacctgtggcctctgccaggcgtttctctgcactgccgcttcccagtagagcaggaatgtgagctgtgttgcactgctgtgaggaggaaaggagttcacaatgggcttctcctcccttccctgaaacacgaagagtttgacactcagtaccaatctattacacagcagtgctcagacctttcgcatgtcagaaagtacatgagtaaatacaggttgacccaggcaggagacacggtgaaccccaacacagtggaggcctcaattaaagttctatttcctgcctgatatcttgactcatgcctgtaatcccaacactctcaggctaaggcagggacatcacagtaggttctagggccagcctgagctagatagcaagaccctgtctcaaagggggaagtgctattttctgacaaggtattcgtgggctctgtgtgtgtgtgtgtgtgtgtgtgtgtgtgtgtgacacagacagacaaatgtatgtaacaaaatccatcatttttaatgttcagctcagtggcattgaggacaagaacattgttttacaaccatcaccactatccatttctagatgtttctacctttctgaagtaaatttagtatccactgagcactaattccccatgaccccctccagcccatctcttggtaaccaccactgtactttctatctttgaatttgactacacagatgcatcccataaatggaatgaaccacttgtcccttcaaatgggtttatttcatctatcatatcccatatatatatgtatatatgtatatataatattatgatatacatgcaatgtactgatcctttggtcgatagatcaggtttttgtggtaggttatgtcgctgctagacattgctttctacatatagtacatacattatcttaaatgattcttaaggcatccatggaaaatggggagagcagtcctcttccttactttgcagatgaacacattgtactggctggttttgtgtgtcaacttgacacaagctgtagttatcacagagaaaggagcctcccttgaggaaatgcctccatgagacccagctaaggaattttctcaattagtgatcaaacgtgggagggcccactgtaggtggtggcgtccctgggctggaaagtcttgggttctataagaaagcaagctgagcaagccagtaagtaacctccctccatggcctctgcatcagctcctgcttcctgtcctgcttgagttccagtcctgacttcctttgatgatgaacagcaatgtggaagtgtgagctgagtaaacctttcctttcccagccttcttggtcctgatgtttgtgcaggaatagaacccctgatgaagacacacatggagtcaggaaggacagtaacaggtactgacagagcggaacccagttctgtttgactccttgcctgaatctacccttactcttcattaaagatgtcgtgcaccaactcttgtctgtccaaaagttctctgttgagaaaaaactgtgacaggaaggctactcccccacacctgccttgaaagaaaatgtgccctagtttgtgtggcttctgaggccacggtaacttctcagcctcttcactgctgtcgtccatggacggagacactggggacattcactcgtacctcacatgtctgacgtgggaaagaagcagtttggggtgctttcttcaaactgtcggtttcaggaggactcgtcagtcagggttaatatgagaggcttctatctctggtttcagtggggtgtctgttttgtctgtgtatatgtgcgtatgtatgtgtgcatgtgcgtgtgtgtgcatgtgtgtgtgtgttcagaaccaaacctacagcttatgtatggtaggcaggtactcttctcctaaaataaatccctggccccaagagctcctcattctaagtccaacaaggccagggcacctcagtatgtaccatgtacttaatccctcccctccctgccctgtcttcagtctacctcaagagaacagcctccagcagcgtttggtgaggacagggcgtgtactcattggcatcatggcccagtcagcatcttaatgttctactctaagtctaaggaaaagcaattaaatatttcctttttaactacgtaaaatgtcttattccttagaactgaatagcagtcagttggagcttcttgtttaattttttatgttttacttgtgtgtacatgtgggggagggcatgtgagtgcaggtacctccagaggccaggagagggcgtcagatctcctggaattacaagtaggagctcctgttgttggtcctgggaatcaagtccgcgttctctgcaggagcaagtacttgcttttagctgctatgccatttttccagccccaaataacagagatttgatatcagcagaagagtgtggacaggcccactgcctaagaatcactcaagagtctgttatctaggacatgacagctacagtaggaataagtaccgttggggctggggggtgggtgcatggtggaatacttgtcgagcacttgtgagtccccagcaggatgtgcacgtgaggtggtgttttgtatcaaaccgacattccgttcagcttacgctcttgcagtaccaccgacaagcactttttttttctttaaagcaaacatttttaaagagaatgtagtatccaccatgacctcagatgatctggaattcttcattaacatctcataattttcccattgatatctgtgtgtctctcagacttgagtggagttatccctgcatttatggaatcacattcacatgtttaacgattcttatgtatctgtgcacttttaggacattttaggacattcaaatatatgcaggctagaaccatattaatattcattctcattcatattcatattcatattcatattctctctctctctctctctctctctctctctctttctctctctctctccaggtttgagattgaaattgaacctctgtttgccagtattgccctctatgatgttaaagaaaggaaaaaggtatgaaaaatcccacccatcccccacaccccatatgattttggggttcatgttttcaacctcgtttctggttgcaagaaaacacagcaggtgtgtgtgtgtgtgtgtgtgtgtgtgtgtgtgtactcatacacgtgtgcacacacatgcaggttgtcctgtatgggtgagtgtgtatgtgtatttacagatatgtgcacatatatgtatgtgtgtgtaggcccaaagttgaattgtgttttccttagtcgatttgcacattacctgtgcaagcaggatcattcaattggacccggagcttcctgattgggcttgatccagagacccaggctctcccattcacatgctggatttacagctggcctctgtccatccagcatttatgtacaatcctgggattcgaactcagacacccatgcttgtgggtcaagtgtactctgctgagccccagcatccacattaaatttgacatttgtaaaaaaaacaaaaaaaaaaaacaaaaaaaaaaaaaacaaaaaaaaaactgatctggaaatttggatagagaaagaaacaaataacacttgaggttgtgtgtaatgtaaaataatgtgttgttttcaacatgtcagctatgcacggtttctgtcctgaagtttttggttgttgcttttgggtgttctgttttttttccatgaaatagattcattgtggggctgaggagagactcagtggataagagctcttgccatgcaagcatgagaacctgaatttgaatccctagcacctatataaaaagccagcataattgcacacttctaaaggctggagatatattgtcttaagacagtaaaacagaaggcaatagaggcagacatccaacatcctgctcttaccgtacaagtaatacacacacacacacacacacacacacacacacacacacacacacacacacacacagagagagagagagagaaagagagagagagagagagaatattaacttcataatgaatggcagaaatcatgtgtagtaactacgaaaattaatgaatacatcaccaaccataaaatatctttccattggaagaatccagtgacctgagattcttccttgaggtcttaaatgttctgtagtttagacatttgtaacccaacaggatgaccatcatgcttctggtattattcacatgtagctggctatgctgaaggaaatgtgcagctctaaaacaataaaatagatgggcttcagattagtgaaacggttagatgctaaaacagataggacttagggggtggtggctaagagcactgactgctttttcagagaaccccagttggattcccagcacacatagcagctgacagccacctgtaactccagccccaggagatccagtgttctcttgtggccttcgtgggcactgcatgcacatggtgcacagatatacatgaagccaaacacccatacacataaaataagcctctttaggcagtagttctcagggctgaagagatagcttagcaggtatgagggctggagttcagatcctagcatccataacaagccaggtgtccccacaaatacttgtaaccccagatctgaggcaggtggagacacaagattgcttccagcctagctgggaaagacaaaaataaacacggcatggttcaggaaagaccctgtcttgaaggacgaggtaatgaatgatggaataggacagcaacactgtttcccaccttctgtctatgcatacaggtgcacatacactcacacacagatgcacataagtaaatacataaataaagtcttaaaaaatcagcagttcggggctggggatttagctcagtggtagagcgcttacctaggaagcgcaaggccctgggttcggtccccagctccggaaaaaaaagaaccaaaaaaaaaaaaattttaaaaaaatcagcagttctcagattttagtatgcacagagtcatagggaatagatggtctaacacagggtctaaggcccttcaccaggcttctctgtccctgtaagtctagatgggggctgagaattttcatttctaacaggtttcctcatggtgctgaagccatctagtggcatcctgttagaggactacagccttaaaaccactggcttacatagtaagaggtccttgtctttttttccttaatagttcaaagtggtaaggggtgagtgtcaggttagtggcctccctgttccactcagtcattcagaagcccaggctgccaagagctcctccttcctcagtcctctccccagtcactccacgttgggcctttggtgcctgagatatgaaatatttgagatggtgagtggaggaggcctggacatttaatatctcagttctgttccccattcactggagaaaagttagtcacatgatcagtctacttgtccacgtggtgactagaaactacctcactaacccactcttaacaaggacagaaagaacccagtaatggctgccacatcacctaaattagaaagcccacgagcgctgagcagcatgtcatgctcaggatgcactacctctaccaacctcctcctcccacaggtaacgacatctttaggtctttagcgtgcatgccaggctgcctcagggttgctctcattcttcctccctcctcctctgaggtagagtcaagctgggccgcactgcccactagactcagtccaggccttccagcctctgagatcattgtctgcgctttctactctgccctctgtgccttgcagctctgcctgtgagaatcgctcgtctgtctctaacgtctcctccatacgtggttttcttcattaccctaatcatcttgtactttctaaaacttccacggtgcctcagggcatgaatgtagtggcttgatttgcttttgctgtgtctgctttcccttcaccgtgattgtaaaccaggctgaggttgtgtccccttcgtgttcagggcaataactcgcatttcactaatacccagaaaatgctggtgagctaatgcaaagtaagtgttcctcatacgtctccaaactgtcgaaaaattgtaacaaaatatcagactttctaacagccatagttatccttcctttagcagaatttccctgtgacttttcaactcttgttgcatttgagaccaagaacctaacgcctctaactgacttttccccgtgctgaccatttacagatctcagaaaacttccactgtgacctgaactccgaccagttcaaagggtttctgcgagctcacacaccctcggttgacccgtcgagtcaggcaaggtctgcagtgttctcggtcacctacccatcttcagacatctacctggttgtcaaggtgatccatacagtacccagcaacgctgacagaaatcgcacggcaggcttgtgtgtcctttgtgatgtgtgtattgtttccctcttgacaacactcgcccttacaagtaacctctgctggaagactagaaaggttggaggcttgcagggcctgtggtcggaggttgcgatcctgactttgctgtcagacattatgttgtgacctgctgtaacttcttcgaacttcttcagacttggtttcctacctgtgaggtagggtgatcacactgacctccacaagttgttgcaacttcagataaagcctggccctccctaactgaggaaagcaccttcggcagtccttgtctgggagcttgccatgatgaaaggtctccttgcagtgtccctgtgtctctagcgccctcagcccagcatacccagcccagcctctgacaacctgagatgtgctgcccttttcatcctcactctctcttttattagtctagtgagagtcaaaatccatggggccattaaaaatagcactccattccactagagactgtctatacaagaaaacttcagatggccagagcctttctctacatattaaacttattagtttgaatctgacaacaagcgtcaggtatttaacaacctggccaggtaattatactcactgactctcaaaggaaaacatttaaatagctcaaaatgagttaaatccaagcgtctgatcccacgaacagtcagacttctgtgtctgggcgtttctccattcggtttggtatcatgtgtctgcatcactggtttccatgtggttgaatagtggcgtgtagggtccaaagaatttgggcagcttgacgtttgcttcttttacattatttcacaaagatggctagctcaaaggaacctgtttcaggatctagaatgttaaagtcagtcgctgggactagaaggcatgcctcagggatctcagctgtagctcagtagtaaatccccaggaactaaaaaagaaagaataaaaataaaatgacaagtcttttgctaagaacgtgtatctgatgatattattgtaaactctccgtgcttctcactgtggctcttaacgtacagaaaaactcaatttcagctataacagcattgtcattaaatatacagttctctctatgggccaccaacaaaaccacactggttctagctaattttatttccagtgctacttgattttattaacctatagtaattacctagtaatggtaatctgttggtcgctactgctgacaacacatgttctcagattttttaatgtggaggtgtacttatttgaaagtaacaaacacattgtaagatgcctggatatgattaagaaatttaggggcccaagagatggctcagtagttaagagcacaggctgctctccccgaggaccggggttcaattcccagcacccacatgacagctcacacctgtccgtagctccagttccaggaaagctgacaccctcatgcagacatacagggaggcaaaacacaaatacacataaaagaagaaataacacattagtaagcaatttaggtctccactggaaagcctatctttctttggtgtctctttgtcttaattgtaagaccttcattagaacgactttccttcaagcacgtaatatttagacaacccatgtaaaggtcacatgaaaaggaaaaggcttctcactttcttatttttactcccaagatgaacaccaagatcttgtatgtatactaggcagagtcacctcgttcagttatcatatatattactttgagggatgatttcaggcttggagatttagttgaagattttgggtacatgaaaggatttgattgacaaatgaggatgggtgtgagcctcaagctttaaaaaagagtttagaaatagatcagctaggcattaaagccccctctgtggctgtaacaggtgcattagaaagtagccattttaccttcaagttcccagctgtccctagtgtgctcctctgcccatccccatgcttatgagggctcgaagtcacacatgctcacacaccagccaagaggaccaaacatgagggcttcatatcagactgaagttctcggaaagtcaccctgaccagtgcagcaaaggagagagtagttcccgattctgtagatgtttgattctagatcgtaaggagccttgccatgggtctcgaataaaggcaagggatggccattcatcttggcagagttccagcaggaagttcttaccggaaaccttttcttctctttccttttcttttatcttttctctctctccctctctccctctccccctctccccctctctccctccctcccttccttctcccttctttccttcctgtggtgctgggtatggagcccacagccttgtacataagaagcaagtgctctgccattacactatagtcccagcccagaaagagtcttaatgactactcagggtttactctaaagaccatgtctttatttgttgaattcgtggaaaacttaggctctcttcagttggttctgcagagccctggtggtgagctttgggaggagaggagccatgtttactgtgctcacagccattctccccagcagccaccacatgcagacctctggaataaataatgactgagtgaaggaatgaatgctggtggtcaggaacactggtcagtttcaggctcaagccctttgcgcccatgtttccagtgtgcttcatctctcagggccagccttctcttacactgttggccatgggatgagctttcaaacctcttttgtaaaaagagacttgtatggggactacccgtggaaccgttgtccattgagcagctctgtgccactttgaaactccactgcactcacctccaccagtggataaatcgtttctgcttcacttggtgcctgttaagaatgtgtgcccgtgccatatgttgaccagatttcttcttcaggtgtctcaagctaatggggccaagtcttagcatctaatttcacttaaattttcttgcagtaaagaattggaacatttcagattttttccctttctttgccctaaacatggtgcccatattcttgacaatcagttgtcaactccttaacttgaagcaaagtggaagacacacagcagacggaaaagacaaaacctctcaaagcatttcctgctgttaaatccctcacaggaaagcagccctaacaggaaatacaagggcacaattacagatcatgtaatctgttcgtttatttgttttgtggaaggtttttagttccaggcctgacttttgcagagcccaggtctcatttttacttggtaagcaataataaagaaaacaagctttgcacttcctacatgtatctcctgggctttgttttataaaannnnnnnnnttgcattttttattgtggatatnnnnnnnnnnnnnnnnnnnnnnnnnnnnnnnnnnnnnnnnnnnnnnnnnnnnnnnnnnnnnnnnnnnnnnnnnnnnnagggacaaagggacaggnnnnnncaagaggaagcaggagcaagaacacgtgtttggtttttttgaggtagagtttctctgtctggctgtcttggaactcactctgttaaataggctggctggcctcaaactcagagattctcatgcctgtatctcctgagtcctggaattaaagacgtgctaccactacccggctccatgctataattttaaatcagagagcatatgtaatgaacatcctatgtcattaaatattgtaattgaacattatttttgtggttgattagatcccattatataaatataatttactcactttgttttaattttatttttgttggtagattgaaaaggtccttcagcaaggagagatcgcagactgtgcagaaccctacatgatcatcaaagaaagcgatggtggaaaggtatggctgtttaagtactgggaacatcttacgatgacctaatttccaaaagtttccacaaaacagtgaaggtgactatcatattttccattttaaaacatgggtacattttattttcatgaaagaggaaagagaaaccagttactgacagataatgttttaaagacgtacacaattgaacaccctaaagatgccacttgccagtgtgaactctggcttagaccaagccacacctgctgccttggttctgaggctccaacctgaaagggttgccaaggccccataagcagaagagggcaagagctcttggttttcctcaacagcacaaggtcttgtcttgtgcagtgttcatagctgggggccagctgccgctcctgctcatcataaattaattagcacattataggtcctaagacgtgaatgagacttttcccagtgccaatctgtgaaagttcccagtatggtttttaaaacatggcccttttggaatcagtcctgtaaacgtcaaataaaattagttgaactaaataaagacagacatttgtgtttttttaaaaatctgttagtatgagtttaggaagaatcccttggaagtgttaacaacaacaatgacattgttaggaataattaaaaatcttcttagaatttcaaagtagcttttgtaaagtagattctcttgggaccttgatgggtaacatactagcttttctttcccaggtttttctcaggagagttgaagttatctaggtaaaagatgtgtttgcctgtttgctgctataagaagtcatagcaaaaactgccatctgctaattgatgagtgtcctttaggggaaaaaaaaccctcttccttctgtaacctttgcttccttatcagctagacttgagcctaagctgttgcttcctgttgactcaggcccatcagtgtagctgctgtcggctcccatacaggccgctgacttggtgcggatattttgtttcatcttgtctctttatcatcttcctccagagtaaagaaaaggttgaaaaactaaaactccaagctgaatccttctgccaacgtttggggaaataccggatgcccttcgcctgggcccccatcagcttagcaagcttcttcaacgtctccacccttgaaagggagagcacagacttggagcctggggctggtaagatctccaactgtgacaggaagcagagggctctcccatagggcagctttgcggttatctgctcattagtaaggacttgggagatctagagggggtgcgagtagatgagaggaagatcataaataaactacagatctgtgcttgaccagtgaccccaatcgccatgagcagttacggagcctctacactcttacactaagaactttgaatggagttttaagtctttgaaaaagttaattttgagtagccatcccatctcaaaagttaaaatacttgaaaataacaagaaggagagcagtgagcaggcacagtatgttaaacaaagacaccgtggtcggctcccacacagaaaaaaaaggggggggggcactgtccaaagctctgaaaagcaaaactcagatttctcagcaaaatccctggtctcccaaagtctatttggccaggtagaatgggagtgagcaccaaaagtaggcagtagttactgttctaacttacagagaccccttttcatgcctctccataaatgcgaaccagtcatgtctataatgtccaggtgactgtagtttccaagtagacccatgccctggtggagtttctgttttcccaagcactttcatattccgcaaatatctgagtctacccttggatgtttcacacattctttggctctgccagttctgaaatgttgccttttgcaggggtggaggccagggaggttgttactgttgttgctgctttcctggcgttactgttgcataatccccagacagaactgcattcattctgatttgtcagtaaacttcacccctgctgaccttcacagccagtctttctaaagcgactgttctatttattgatttgttacaaagtgtggaggagctcggtaggtactgcaagtccaagtaattcaggcagagggcttgccaagatgttaggtccaagtaaaggatagttaacttaagcactgaagctgaattcctaagacataaccagagacagggagtttaggtagccaatggtagctcttatcagcatgagaattgggcataatagaacatttaagagctgtgctttctaggcagtggacaattcataacagaacccctaggcttacagaaaataagacacaagatttcaacctggttcttcaaaagaaaggaggaagctatagtttgagagcctcagccctgtctggtttccagtgaaaaggtcagccagggcacttctgttgcttgatccacactggaacagaggcaaactggatccagaatgtgcacaagctggtttgagtccccagtgccttcagggatgcgtgagtgtgtgctctcccaggggaacacaagtgtaaaagcaaagcaaacactgggctgactcaatagcctctcagcagaccctgttctggctgagctccagactcttgcaggatgacacccggccagctctgttctcctgcaggaagggtttagagcaggcctctctctactctagtaagaatattagggacttgaggagggggactaaggaaggatgagccctgtggagggatggctgggatcagcaataactggtgtgtgttctgacatcgaagaataacagttgctttcctcaagggagaaactctgtgggggagaggaggagtttgtcccagtccaggaggccttctgagagaaccctctcctttgaggaaaatggagttggatccaacttcaaaaccaccaccttggccactaacatcttcttcaagcaggtatctgttttgttacagtgcagttgaatttggttgtattggtgagggtgttagatccaaaggagtggtgtaatgtaatcagagaagttagtgtggtctgtactcttagttagggttttattgctgtgaacagataccatgaccaatgtaagttttataaaggataacatttaattagggctggcttacaggttcagaggctcagtccgttatcatcaaggcgggaacatcagcattacatcttcatctgaaggaagccaggaacagactgagcatacccaggcagctaggaggagggtccccaagcccacccttacagtgacacacttcctccaacaaggccacaccttctaatagtgccactccctgggccaagcatatgcaaaccatcacatctgttcagctgggttgttacaaagattaggacatatgcagatgtgccaaagggtcatcctccacagtcaggaactgtgtggagctggtggctaatcacagcagaccttttctctgagggagcaaaacttaattctctggggcctgtgaaaaggggtggggggaggggacatacatacatacacgcgagcgcgtgcgcgcacgcgcgcgcacacacacacacacacacacagtagatgaagcaagcctccaacaactttatcttttcttttagcctttttgtatcacctaagacaaaaattctttatgtaagaaaaaaggtcacctcatagccacaagtaacctattctccaaaaacaaccatcacaaaaacatattcttcagaaacagactaaaaccactacacaaagggagatcacaacatgattaccgattaaatattcttttgaaacccacacctaaccgaacatttctcatctatgtttctctccacaaattcatcctaacctcaaggcaataattcttttgtcattgattaacgaagattaagcaagccaagtgtgttgtagctagttttctctgttagctgatgacagtttgtatttaccaagaaacaaatcacttatctcatgtcttacagtcatctgttctctgctcttatcctcacaataggaccagtttactttctgttcctagcaatgtcctttcatagtgcacaccaaaacctgtgatgatggccttaggtcacaaggtcaagggactcagacccaacctgcagtgctttgcttaagctttaatctgcctcagacctccctttgcacactgactatgtgtttgcaaggcatgagaactgaccgtgccctgtttctagcctgtatgaccctcactacagagagggggacacatcctactcttagttctgtctttatcatgtgttccaggcaaaaccacctaaaccatctcctgactcttccccatcaagtaccccagcttcctgaagctatttaaatcaaaccagggattctgtaaaaattaccaattcactgaaagagcattattctatgaaagtccatcttcattttgatctgcaggaaaattgcccaatagattgggtgggctgcctctcatgaagcagtcacactagactgtaggcaggaggtgacagtctctccaggcccattcacaccatgctagatacaagaggaatgtggcaatgacagacatgagaaggcacagcagtagcaagaggcgatctagggacaatccccgtgtggctgtgcctctcctgtacatccattacagccgtgcaaaatcagtggcttgtctccaggaaactcacgtgctcactgcagttcgtcctgcgtggcctctgccacaggtgtgcccctggctgaacacttcccatggtaggcatgtagagggcggggcttacacataccttcctcattcaagacaaaggcaatgaaatcagaaagaaaagacgcctttcccactttcgaatctctgaaggagtgggcttgttcagcattgtttcagggactaaaaggagtttctgctcatcgccatcacaagacagccgaatgtgaccttgcttcctcaaggtcagccggctgcctaggagagcagtggaggctctgcctgcagcagtgctgatgagtgattggctgagaagagcgcagggcggtagtgcttgcactaagtgacttcagagctgcctggctcactaatttctatgaaagacttgttagactagataagtcaagtgtggtggaactcaggagactgagacaggaggattgcaagtttgaggtcagcttgagttacttagtgggactatatctcaggaaagagaaaagaaggagggagggagggagggagggaagaagagaggagagcagagggaaggaaaataaagagagaaagaacatgcaaacgcaatcatctttaaatggctttcagggggaagtcttagaaatagctcgtcccagtccaggaatcgatagaacctccccactaactgcaagcgtctcttggcaggagggagatcgccttagtgatgaagacttgttcaagtttttagctgactacaagagatcttcgtccctacagcgaagagtgaaatccatcccaggtgtgcttggcttctcagcacctctagtctagtccgcttctgttgctatggtacagtgctgatcaaaggccaccgggaggagggaagggcttacttggctttactctttcacattgtggtccatcagggaaggaaggtaggagtccaagatgatcctcctgtcaggaactgaagcaatggaagaatgctgcttactggcttgcttccagggtcgtgttcaactgcctgtcttctgcagcccaggcccgcctgcctgagggtgttcctgccctcaacagggtgtgccctcccacactaattaacaatcaagaaagtacttcacaggcatggccatgggccagtttgatcctgacagttcttcccttgaggggtctactccccaggtgattctaggtttgtgtcaagttgtcagcagaagtcagctgtgacactcttgaacagtgcccaaactgtttgtgattgacatttcttgttaaaactgctgagggcgatatgggttttttgcgtttgaagttaagaatctgaattgctgtgcatttttgacaaatctattaatggtttctcattcataaaggttgtattctacaaatagtgtgctttagattcggtctctcagataacccagtgatcattggaacataccaacagccctttatcacacaaaatgttatatgggagtctggtatttaaagagagcgggacgatttggtaggtgaaagcacatttatcctcaagtgaacaccatatgctatttcaatatagcatatgctgtgtctatatttctctgacacccaaggtgaaagacctcaatccaaagaccgatttttactgctaccaatacctgaacattttttaaccatatatagacccttctagtcagctcctactcattgtataaatccttactttggttttataaaatgctaatctcaaaagtgatagcaagcaggcttttaaaaatctcaaattataggaaattatctgggaattccaaaacacctatgttcccacagcttacctacaacatggtaacccagggttccttcttgacagatttcagtaaccccaccccctcctggcttgctctaggctcacttaggctggagatagccccagctcctgacgtgatgaactgctgcctgacacccgagatgctgccggtcaaacccttccctgaaaatcggacgcgtccccacaaggagattttggaatttccaatccgggaagtgtatgttccccacaccgtgtacaggtgagaaatgcgggcccttgtttggatagtacactcgctctctccaaatccagtctctcttccttcttcctgagtttgaggggaaactaaattcgatggcttggaaccatagaggacagcgaggtcgcttccagagatgttttgcccaatgctctgtgataaagatgcatttttttcagtcataattgcaatagagtctactgggtatattctcaccacaaatgaaaagaaggaaaacggaaagaaaaccaaacctatcgcctggctttctcccatgcagaaagtctttaaggacaagaggaacatgactggaacacacaggttttccattgaaaacccagctctatccagcaaaaacctaagtcagtgacagaaatagtccccagctggtgcccaatgttttagtgtgttccgctaatacaatagacaaaataaaagtgccatcttactttgtttcaactaatttacttgtaagtgccatggctaccgtaccgaatggcgaaagagtgagatcctgtacaaccgaaggtgagactgctctgcttcctaagcagtcttgtgccctgactctcagggaatttaaggggcctctgacggtgctcctctacccaaagcactgttgcggatgtgctcttgtttatttccagaggcttcctgctttcaaatgtggggccaagtgccaaatcgaacatcacttctctactgtccatcagggacactttgtggactttgctttccatataaaatacctcgtcaggtctttctgacctcacagagctgcgccttgctgcctatggtgcttcctttccaagtggctaaaccaaacaccagacaagaagcaacttaaggaaggagggaaaaagggaagggcggagggagggggagtgagggactccattgactcacagcttgaggggaatatagctcatttgagagtgggagacgtggcagtggctcatggtggagggctgtacagctgtacagaggaccgcctcacgtcatggttgagtgtacatgattcgcctcacgtacgaatctctgcatactaatgctgttatgtttatattcatatatttccacttggcttttgttaagtattcgtgggtgtaagtgtgcgtgtgtgtgtgtgtgtgtgtgtgagtgtgtgtgtgtgtgtgtgtgtgtgtgtgtgtgtgtgtaagccagaggtcaatttcaggagctacacaccttgtttattgagacaaggtctttcactggggcctgggctcacaaattagagtagactttctgctcagtggttctcttatttctgaattcccagcattcgtattataaactaatgacgccatgcttgggttttccatggtaggggagagggtgtcaagcccgggttttcatgtttacaagctatctctctagggagtgctatctctccaccctaacacttgcggctttccttttaaatttatttagttttatgtgcatttgtgtcctgcctacatagatgtctatgcaccacgtggatgtctggtgctcatgaaggccagagagggcagttcccccagactagagtgacagagcattaggagcatccacatgggtcctgggaatggaacatggtttgtctggaagagccaccagtgctttcaactgcccaggcatctcaccacgcctcagcattggtagtttttactcgtcctgcccagtgacagatttttaccttgtccctctgtgaatgtgtgtgaaaagtttccctaggaatatgcctaacagtacattgctgggttacaggagacatttgtttttagtaacttttatatcgtttctccctccaaccccccaaaaatgattatctatcctcccagcagtgcatgggagctctcatctctccagttcctcacccacactttcctatgtgacatgcgaggagttttagagcccacccgtgcccaccacacatatatcttacaggtttcctaacgtgaggcctggaaaggacaggtgaccactgagctaagtaaccatgagaagcacgctcaagtgtcgcacagtaagaaatggagctcttccttctggtgctggtgaggcaacaggacccccaacttcatccttcctggagcaaatcctcattttcttcaacaccaaatcagccttgagtctccctccttaaagagccaagtatttatagaaagtagtgattccattccccaccccatggaggaagatgaaggatgaccatgtttgcttaccgatgctgtctccatctctgtggaaacctatcctttaattggaagaggacgctcgtggcatgggaataaacttgtaccaaatgaattctatagctatccaactgccccccccaccccagcatttaatcacccacaggagtcatttactacagacattatcctttaatcacatcgctgcaggatttagagtgcatctgtgcactgagccattcagaatgtgccagtgctgaggacaagtctaggcagcttgtgctgtacccatcgtggtgtcctgagaaacaggcctgcaaacatagagctgctgttctttggttgtgccatagaatggccaaggccgtgcctctggaaccaggtcttcactcttagtgatggaaggcacttctctccagtctggtaaaggagagacttgttcttggctccatgctactgtgtcttagcagagtttctggaaagagacatgtaacaaacttggcccagtatctttctacatgaaaacttttaagaaatttagaaaagcatgttgccttaacttcttgtggtgttaaattttagtatttctttaatggtcctcatgttctgagagcttacatctgatccacaagcaaaagaaaagaaacagacagctgggaacgcaatgggcttttggaacctcaaagccactctcagtgacacaactctccaacaagaccacacctcctaatccttcccaagcagttccaccaagcgcagaccaagcatttgactgtatgaacttgggggagacattttcattcattcaccacaaaatccaaagaagttaaatacacaaaaatgggctctgaaaaacagatcaattcaaggataaatcccttaaaacttaagaatgtgatgtataacttataaatactttatatagctatgacctacagaggataaatgcacctggtgcaaacactgaatgcttccatggccaaagccagacgtttagggtcagatttgtcattttcaccagaccgtacttcagggaagggaactaatggctgacatcaacccttgccttcctcccacctcctcaggtaactcctttgttagctgtgcctcttaagtgtcttctgccgagctcactgtggactatatatattctagttgagtcctgtctggactctacccccaggtacctcaaccatacagaagttgctgtaagaaaagggcctaaagcccaccataacagaaccattcaggcttcccaggcatcaagcattcataaaatggacacttgctcagatgatcgagatcacattacttattgagaaatgctattccaaaaactgactgcaccctgacatcagagtctctagtctgaaaccaggtccaaaccctcacaactgacaggaaggatggatttgactgacagtatcaatgtctgtggagggatcgaactagaaaggtatcctttgagactgacccagaaaagcagctctaagaagtcaccaagagaattacaacagttccaaaagtgggaccctaaggttgacagaaaaggcagtccaagcctgaacttgcattcctgtctccataaccagacttccattttttaagactaggcatttgcctaagaatgcattggaacaactcctggcatattttgcctgatgcccaacacagctggcaatagaggtaccagatgccttgtggtaggagcaaaataaaaatagtgtgaattggggcccagcctgggcaagaccttcaaggccatcttatcaggtgactgccgtgggggcgtgtgcacagatcacaggctcggagtttgtaatgagcttgttaactccatgccgaccttttaaccagtgattacattaaagcaagccacataaagtgcgttttcatctctcggcccagcctccaaagtcttgtttatctaattattgggctactctggaggactgtgttgctgagaacaagcctgtcagtcggaacacaatttctttgatggataattagctgtttctaggcctcctcctattcagctgcgtgttctcagaccagaacgtctgatgtggcctaacaaagaggtgcctccgatgcccccgtgatggcttaatggattccgtgaggcttgcggcatagtagaggagagaaaggctcagggtagatacagggctggttccaagtgatcgtcagggagctagggtttagtgactctgatttgtaggaaagaaatgaacccaaagtactctggaagaactggggcacagggtatgcccttgaatggaacttgattgttttcaataagatagacttccagtttaaacccagttgtcattatttctagaatggatcttttcagtactgggcaagccacaccatgtccagtctcactcgggagggccctattctggagctccaggagctgtcctttgacagaaagtggctttccccactgtatccgtcctcagttaggttctttgctatgtcatgtaagggtctgttgtgacttagagcagcctgccccttcatctgcttgatttgggaagcagtcccagtgtacacctagatttgcagtcaagtgcgtttgtcaaagaacgagtagagcctctaacccaggagcccacacctcacgtaaggaaggtcttgctctttgcactgtgatgtgtcatcccacttgcctgtgtcctcgctccagtgtaattaatcataatttatacgtgatcagtaatctcggtcacatataaaaatcgttacatttctttacatctccataaatgtgccttacataaatctctatcaaaggcaccctctattctttattgatccattagttctttgagttttatttcctaaggactaggtaaccccttccaaaggttccagatatgaaagatactgaaggcagagtgaaaattctctctgccactcccgacttccagccacttagttctcccattggaagcagcatgtttatgtatgcgaaattgtccacttatacaagctccgttccataaaccagcgcttgctatgcctgctgaagctaagcagtgggcttctaagtgtgtatatttaccagggaaacaaccgatggacagaccagatgaaaagtgtttgctccatacctcaggctggctgtggaccactggaggcaaccattcgattacacttccttgcagatgtgaattggacgtgtgtacgtttgtcctatcacacattaaagagcatgaccctcacaccctcctgctcctcctcctgttcctcctgaaccctttttataagctctctctctctctctctctctctctctctctctctctctctcctttttcagatctgtactcaatctcatcgtgcactgacttaatcttgcgctgggaggctttacacacacacttcatgcttgtctatttactggacagctttttgctttttatcctctgaagaagtgtttaaagagggctgcctctagagcccttgcatttgttttactggacttagcaagcagaggccagaacttactaacacaccctttacctcagatgagcagtgggcaaaagtcaagccatttgctatagccaaggaatggaaacaaaaatgattcctggctctagaacacgctcagtcctagtgtaaatgagggacacggagcccacatcctgatgtcctgctcccaaattcaacaatcttctttttctctaataatggaaaaattcaaaagagagccaatccttcatagacttatttcattgtcttcctaagctatgattttagtacaccattcagccacttgagggcacaattccctcacttctggactcgggcaagcagctgccttttgcttcagaaaacagattaaactgttttgttacagaggcccacacattttaaggttcaccttttccaagactatgaaaaagtgagagggaccctaacgccccaagagatttttttttttttttttttttttgcagagggttttattcttaccaacaggtctgtcttctttctgcattagtacttttttggggaaggggagtgaagagacgccaaggtatgcatcctgtgcacacacagagtgaagtttcctttggggcagtagcatgcaaacctacccttctatgaactctctctggctcaggaacagaagcagaggattctatggggtgtgcaggtgaggcggcgaggaatggtgcgtgaggacaggctgtgtgcgcggtccttgactgtacagtgagacaggctgtgtgcacggtccttgcctgtacagtgagacaggctgtgtgcacggtccttggctgtacagtgagacaggctgtgtgcgccgtccttggctgtacagtgagacaggctgtgtgcgccgtccttggctgtacagtgagacaggctgtgtgtgcggtccttggctgtacagtgcctggtccggacactctccttattttgtactcatctgcatctgccacacttcggctgctactccggtacaattgctgtaattaaaattcgtgcttttcagtggtgacagatgctatttttacccccataggtcctatttatagaattcagcaagagttcacaagacactgtcttttcatatagcctcaggtcaaggctctctggggtaggaggtatggagaggtaattaaatgaaggcaaatcccagcttgtagttcagtgtgatgggtagttgtctagactggggagagttccctgaaacccaggaggccgtctttggtttctgtattattagcttttgtcactgtttacaaacagggtctcactagtttgctcaggttggctccagacttctggactgaagtgaccctcctgcctctgcctcccaggaaatagggaataaatgcatcattgtttgtgtgttttaaaactggtcttcagcagggctaattctcctttgatggattagccttcaggactactctctcttacttctttttctgatgtgggagagggacgaagaccttctgtttttacgtgttttcatctttgtttcaactttcctgtctactaaggtctcttctctagagcagaggtatataacggctccccatgaatggatgccctgtggtttcaggccacagacaaccttggccgctcacagcaggacagggctaaccaagagatactgtatctgggttatctgaggggaagagtggacatgagtgggagaggcaggcaaacaccacaggcacaggtctgcatccccgggcctgcaggaggggaggtctgggtcctgacagcctagtaagacgatgcttttgcttttgctttgagtgctggacgaggaagttaaggcctcatgctcctgagtctgcagtctaccactgagctacagacacaaccccagcatgagaaaccgtggcgaactgattagatgtatttttttacattgaaaaacagaaaatcatttgcccactagcttaaaacaccagagagagtataaggatacaagagatgggtctccatcccacctcttttacttcatattcttgccaaacaactttcaaagtgtgggtttagatccacgcaactgttcgtggagagataaacaggatggtttgataaggacaatcagagggcctcgttgggttctaaaggatctgcacactgaggctaacagttatgctcggtggtgagaaaatcccatgcacatttgtgaccgtttcttcaaactttaaaactaagcctgggggggaggggatggggcagagctggagaggtggctccgtgatgaacacttgctgtcaagcatgaggacttgaattcaaatcctaatatctgtgctagtcatggccgtgtatgcaagtgtaaccccaggaaggggataggagtggggagtgactgacagaagcccctgggatatggtgggaaatgatagagcaggatgtccacgttctcctctggcctcaacacatgtgcatacaccacatgcacacgcacacacgcactcacacaccacaacagtgctgagctggcagttcctttggtgtcacttgaaaagggtgatacagatcccctatcaatttatcagatttcaattttctgatgttcctgcaatcaggtcacagatgggagttggatcagcaaccattgctgctgctgatggtgatggtggtggtggtgatgatggtgatgatggtgatggtggtgatggtggtggtggtgatgatggtgatgatggtggtgatggtgatggtgatggtggtggtgatgatggtgatggtggtgatgatggtggtgatgatggtgatggtagtggtggtggtggtgatgatggtgatgatggtgataatggtggtgatgatggtggtggtgatgatggtggtgatggtggtggtgatgatgatgatgacgcagctccccaggctcctctccttttctgtctctcttctactagtgtatacttgttgttttctagccaccagtttcacagtgacatcttttcaagtgtattgttgtcaggtaaccgtgttcgcttcccatcacatttgctcctccccttcctcttcgaagtactggagaaggaggggggcggtgggatcattccacaagaggacagcatgaaatatttatgcttctatatctggcttgcttaacagaaagatctccaattacacatcataagctccatgatgagtaggtgttagctgggagagatgtggctgctgtcttgaaacaggcctcgcactgaactgcttctgcctgaattctgaaggtggacctttctcttcaccccacacagcagggcctcctttccgtttttgttttgcgctaagtccgttctgaatctgcacttgacctaacagaccactggaaacaaaaataagcactgctaatggcacgagcccacgctcacagaacagcagggcagggtgcagcagggctctgagtatgtgcagttgcttttgacccttgtgccttgagattatcagagggagcttacagggatcatgccttagctactgttctgtcgctgggatgaaacaccatgaccccatgaccaaggcaactttaaagaaagcatttaactgggggcttgctcacaggatcacagggttagttcatggccatcatggcagagagcaaggagcaggcagacaggcatggagctgaagcagtagtggagagatcttctatcctgatccacaagcaggcaggcagcagaaagagtgagactaggcctgggtgggcttttgtaagctcaaagcccagccttagtgacatacctcctctagcaagaccacacctctgaattcttcctaaacagtcttccaactggaagccaaacattcaagtatatgagcttctggggccagtctcacgagaaccaccatatgttgtatgcacaaaataaaggaagagagatccatctaagccagggcaaagtcgatacacaaaatattttttaaacttgctggcagtttctcagaaagtaagctattcatgtgaccttaagcttcctagcagtgaagcctaaataagaggaaaatatcacaatcaactcttgggcttcatatgtctgcagattaaaaacaaaccaattctcttgggccagtgcctcttgaatgtgtcgggcatggtgtttgtcatgcaggctcccaagtgatgcagatgcctactgtctcttggtcctctctggacagctggcagtgacagaattatagagcatttgtaagtgtgtgtttacaaagcatacttccactttaaagaatacagacacattgggttggtaatagttccacagcacataaaatattgagctctgatgatggagcccgatggcaccggctacaaggccaagggcttcctagaagaaacactgtccaaaaccagaaccaatcagagttctgagattcccgactcgactttgttctttgtgtatttaaaaccctaaagcttctctctgacactgtgctgcagcacctgtacttaagtaaacgtgaaataaccagccgtccttactacatctaaaagaaatttccctggaagggaaatgcgagtggcaaactaaagtcacctcctgggccattcgccttctcggtgtatctggattgccgctttcctttgaatgcttgcatcagggccatcagtgaaccacagatgctgacatcaggaagcatttgggcgtctgctggaatcagtcttgccctctggctgctgaagaggtgaagggcgcccacttttctgttggcagcaaagcctctagtgggggcagttggttcagctgcatttccactgcagtggcacctcacctctttgtctttgcctctgagattactttgaaatggccacagtgctgctttgagaaagcagagagccttcctatgtgaggctcttctggtgacaccacaccaagagaatccagtacaggccatctgctataaagcagggcataccaccagtttgctattaaaacagttgactggtgttggttgtaggggcaggtgtgtggcgcccgctcactggtgcctaagatgagagtggtaacatcgaaccccactgtccagtccagcaggcactgccagaggggcttaatgcccttcatccggcctcttcaaagcatgttgaatccctagctcataattcctccaagcatgacatttaaggatgatcagtacctatcaattaatctaaagatgaaatctggagcattccagggtttaaaagaattctttcaaaagtctactgcagtgcgaagaatcaagatacaaagtgttcaccaaagctctataatcaatgaaagggagaaaatagtgtaaatgtgcttatggggactattatacactacaccacctctctctgtctgtctctctgtctctgtctctgtctctctgtctctcacacacacgcacatacacacacatacacacacacacacaggtgtcttgtggcattaacgtaaactgccatcagtacattaatagatcctacccactcttgatggcacctgttcctcaactgtattagatttaatctgatctgactgatgaatgagattggcaggtcccctgaggcagcagagggcagagaagatgtggtggatgttgggtcttctgctctcagtggctggctcagagaagaacccacctcatctcacagggctgtggtcttctcatcttcaaaagcactggcttgcacttggtacctccaacttgaagacccccggattctatgccagtccttttgttgaactggcccatcatctgcgctcctggacgggctgtgtacacacagatatatgaggctcattgaatattctggccactgaaattaagtttagattattgccttacattctttttcatttgagtatgagaagtattcagtgtagacgggactaaaagccaacaagaggatgggataaagacagattaaaacaaagggcaagaatccaggggtgtgcggctgccacggacccagggtggtgacactgtggtgtgaagtcagagtggcctagaaaggctactgcaactctaccagcccctagactctcatctccatcctgtctccagtgagcacccagagttagagagacagggtcaacaaagtgtaggaatgctatatatttgcccctatgacctttgaactttgcacacaaaccaacagcccctgtgttcttcagagttccaaatattgattttttttcttgaattacctgaaagcattccttactataagatatttgagtagaaaatccttgggttttgtctagtcttgtcttttgatttctttttttttttttttggtcgaacagaattgtgctgtatactcctggctggtctgcatttccttttgtacatcaagctgatctcagctggatgatcctctggcctgtgcctcttgagctctgggatcacaaatattacactcccacacctagctcagaagaatccttgagttgtaatttcttcctggatatgacatggtcttctatagccagatatctttagttcagtgtttctccaagtgatttcctagaatgctaaagctctgaaatatactgagaaaggccaggcagataaagggagttctgaggtctaaacatttggggaaaggagtagagcccttttccttctaaggcagtgtttctcagcctgtgggtctcaacccctttctttcacaaggggctctcaagaccatgggaaacataatgtttataccctgcttcataatagcagcaaaattacagttatgaagtagcaatgaaaatacctttttgcctggggggcggtcactgtaccatgtggaactgtataaagagtctcagcgttaggatggttgacaacccagtggtacatcagggtacacagtagcttgtttaatcttaatttgccctaagctttcccagcagtttagttaccctgccaccttctttgctccaaatactgttaacactacatagccctgggattagaaagtgtagaacagactagagaaatacaggcgtaggaggccgctttaaccaccccaaagctaatagactcagccataatactaacaggaaactaagtgagacttgaccgtagtctgtgaaacaatcttatttcgttattgatgggcttccaatgaaatagattacacagtaaaactttcaatcttattctgaaatgggaggcaggagataggcctagttcccagatctggcctctccagcgtgccatctacttaactcaggaaactgcacattctgaaacacttagaaatcccatctcatcctctttccaggccaggacagagattctgaacatgaacttgcctcccccgagtggttcatcgggattagatttataacatggctttctgggctcatcggatccaaagtgacttctttggggcactcttcacagtccatcagaatcaggtccactcagctattcatttacatcacacttgagtgctagattcactcactcttttctactgaaacatactttacgtttgaatgtagacccaaatcggtaacattaataacttcatgatttgtactgagaatgaaaaaatatgccaaatctttgaaggaatgtccttatttattcagatagtatatgtgtctgtgtgagtatatatgcatgtttgtgtaagtgcatgctcactgagatgaaaatgaagaagatggtgtcaggcatcctccaaccctctcaacctattccatggaggcaggatctattcctcagctgagagctcaagtctgctgggctggaagccagcaagctgcagggagcctcctttctcttcccctccctcagacatggggttgcaagcattgtccagatgcccatttcgttgcctggctactgggatccaaactctgttcttcatggttgtgattcaagtgctctaaaccgtggaaccatttctccgcacagacgcgtttagacatgttagtggagacatcagttgtcatcatcagggaccatcacagtaacgtggacatgggttgcagaagacaccttggaaagtaataaagcagtatcaccttccggatgactcctcgcttcatcagtcatttccagctgcagacactttatggcagcatagcattgcctacttttagtgtgacccaaccctgtcccacgactgtcttctgtatctgctaataacgaggttcatgtactcgtcacagccactgatacaacaccctgtccttatagccacctgctcatagggtaacacctgaacctgaggtctgaagtatggtggtcgagctgcaccttcccctgtggtcctggccacagtataccatggtggcatctcacaaaacccacaatggtctgccaccacctcagaaagcaaactctggactaaaacaagagcagaagtggactctagacattgactactgattattggcttctcttttttccagaaaccttctgtacgtatacccacagagactgaactttgctaacaagctagcatccgcccggaacattacaataaagattcagtttatgtgtggagaagaccccagcaatgctatgcctgtaagtcgatgggtagtgtttgcctccagccgggtgggctgtgctccctctgtcaggtcacagggatgagatcaagagttcctcagcatgcagggttcgtccaccacacacacacaaggatccacaacacacccaagggtctctcgatgatgctagactagggctttaccagtgagccacatctggctcgatgtacggaatattttgttccagcacagcctacatgcaggaacctttctggatagcccagaattgtccacaggataatggtagagaaacagcaccagttgtaaatctctttcccccattatgcctttgtgagatgccacaccttggaactgaagatcattttaaaggattgaaaggtggtgtggggtctgtccacattgcccacggagccgggccattctaactctgcagagttgaagggtggcatggtgttcactttttgcctgaatttccttcacaattgcacataggtgagcatgagtagaaccatgcagagcaaacctgaatgaagcaatagctggtgataaacacaccagctcaaacccttttggagatggatttttatcctgagtcaaattataaactaataatacagactagaatagtattatctaagaggtccccaatggcagaatttgctagtaaatgtcatggttggttagctgttactattcatacatgtcctggaattcagctaacattcagttggggttgtagctactgggaacacttgtttagcgtgtatggaggtcctaggtttgatctcctgcagcacatgggggcatgggggaggatgcctaagcacaaagtatgacagggagaggtttgggcttttccccccacatccttttctggtggaagaatttcttcctttccccatgtatctactttctaaaaagtctgccctccctcccacctcttctctgatgcaaggtgagctcctgcaacagtagcaggaaaggtggaagggagcggatgcttggaaggaaagaggtctggaggactcacctagtcctccctaccctatccctggcaggtcaccactcaggctgccaagtgggtatgtgcaccttctgcatgtagccaacatactcagccaagggacagcggtggtaaatgtaagccaattctccctggtctgtagtaactgcaggttcactagacagatcatgtaccatcagggctgcagcagactccatgacccatccacacccaggcggccagggcagtggagactacaatcacccccatggctaattccttgtcctgggaggggagaagatgctggtgtctcactggggacaaacgaatgctatgttgtatatgtctgtgcacagaggcacaaagagacttctagcttttcagcctcacaagcctgtgccctcggtcacgcattattcccttaaagcctcagttgacgcttcaccccacttctggtccatgtggttcggccagtggtaggtagccttaacatataaaccacggccccgtgagagcggtatcctgtccgtgtggtagcacctgttcatagagcccaaaatcgctcttttttttttttttttttttttttggttctttttttcggagctggggaccgaacccagggccttgcgcttcctaggtaagcgctctaccactgagctaaatccccagccccccaaaatcactcttaacttggttccttccatgttggccaacaggtcatctttgggaagtccagtgggcctgaatttctgcaggaagtgtacacagctattacataccataataagtaagtatatttcagagtcctgaccatatgctgcaaccatttcaataacccctaggtttttgggttttagctccacaagtacttttcccagcagtttttaccgcatggtaactgaggggcagaggagtctacacttatcctgtgccaccaatgcatgacttttataaatgaccaaggctttgataagaaatatcttccagaaactaatataattctattttaaaaatgatgataagggggctggggatttagctcagtggtagagcgcttacctaggaagcgcaaggccctgggttcggtccccagctccgaaaaaaagaaccaaaaaaaaaaaaaatgatgataaggacacttataagtgttaaataaagacgagtattttctcactcagtctgagatccagagggccagaaactaagcccaattctttggtcatcttgttgtctgccaaccaaagaaagcatggtatattcgattatgtcagtaaaaatgagtcatgggactgactatccaacctcggtttacacgtcacaggagagcaggtaggtttcaccttggcctgatcaccagactcctttaggggcttcctgtgaaccttgaccaggcttgtcaaggggactaagtaggtgaggctgcgaagccttcgcacagaccattgatggggacagccacattcgaggcctgttgttggggctgagatgggaaaagaggtcatagccgtacacgggatctcatcctctctccagattgtgtttcccccattgtgtggggaaagtccttctgtctaacacagccttctgattgtgacagttttacacaggtgcagtgtttcccatagtatcaggtggctgtaaggccttacagctaaggagcaggataacgtgaggtgaaaagcccacagcgtgcaggtgcatgggagcaaggggtcggcaggcagcgggtgctccaccttgtacccagggactcaggcttctgcgaaagtgatctgcatccagtgtgcttttgatacaggtctcccgacttttatgaagaagtaaagattaagcttccggccaagctcacagtgaatcaccacctcctcttcaccttctaccacatcagctgtcagcagaagcaaggcgcctctggagaaagccttctgggatactcggtgagtgcctccccctgcagctgcttggtgcgtggcagccaaggtccctgtgggagaccctgtgcagtctgctcacttgcttttctcctgtcgggagcggcaaactgtgctggtgcacatttcagcagagaaagagtaaagaaacagctttacttagagaattataggctcctccgatggaaatctggtgggcagtaaatctttaaagaacacttaagtaaaaaggcattgccatatctgttatttccaaatttaacgtgagtgcttcacatgtagaattagctctacatgggtgaggggggagttatttctttaaaaaccatgaaaggtaaatgaacaccattatgctgacaggagcctgacagtggccaaaagaaaaactgctactacacaggcccaaaaagcagcaagtcacagccattaccatctcaggaacactcggggaatttacaatgcaaagaacaggagatggaaagctgccaccagcaggaggctggtcaatatctaatcattgtttggttttgtttgatggctgcgagctagataaatagttgcgtgcagccataaacccactctgctctcgacaccatctgtttcagtggctgccgattctcctgaacgaacgtcttcaaaccggatcctactgtctaccagttgccttggaaaaactaccacctaactactccatacattctgctgaggtaaccagtgctgtgtagcagctgcttcctgtccagctgtggtctacgatcccttccccacacccacttcccattcccattcccagagatgtttctcttgggttctccgggggctgccatctccaagcacactgtgttttctcagagcacattgttccgacatcaccgcaccagaatgttctgtaggtgcgacctgcacacatggaactgcctgcactgcacagggtctgcagctgaggaggctggttgagcccacttgtgatagacaccgtacttgtcaagaatcctttcaggatgcttccgggcctgaatcagcagttccacttgtgggccagtggtcacagccaggtggatgactgcaaagacgccagtgccagagccagtgcccttcctgtcctggctgtttttttgcatttgcaggccatagcaataccccagtctaaagatagtcagtcccatggctctcagctcagcatcacatttctccactcatcatcttacccataaatattctatcatgtatcttgaagataggactttctatcacagcacaaccagaggaccctaaactttaacgtaatcctaaggatcatccgttctccattctgtgcccacctttcctgtctcccaccaggatccaactgaatcagggctcagatcacctatagttcttttaattctcttgggtttaaagttgaaggaatctccgggaccttgaatttagatagacagacccttcacagtctttctcccccgccattttctgagagcccaggctggctttccctctgtcttagactgaagttgttcccgttgacaccacaggtctgcctaaggacagggatgtttcagttcattttatgtcctcggcctacagtgccctgcagtaaccctcacaacatcttttccagagccaagcaaggtggtgcctgccgtaatctcggtgtgcatgaatcccagtggcaggaagatcgctgagtctaaggtctagggggccattgttaaaaaaacaggagcaaacaggaagcatacacacaaaacaaaagcatggataaagcctgaggtcctgctgttgctttgttgaatttctttctttctttctttctttctttctttctttcttccttccttccttccttccttccttccttccttcctttcttcctttctttctttctttctttctttctttctttcttcctttttaagatttatttatttatttattttatggatgtgtgtacactgtagctgtcttcagacacaccagaagagggcatcagatcccattacagatggttgtgagacaccatgtggttgctgggaattgaactcaggacctgtgggagagctgccattgctcttaaccactgagccatctctccagccccttgaatttcttttaaatatttttttttaagacaggatcttatgtagcccaggctgtccacaacctcaccacgtagccaagaatgtctatgaactcctgatcctcctacctctgcttccctacaagtatgcaccacccccacagtctaaacctgagtcttaaggcaaatccaaatccctaatactgatcttccgctctccaactgtatgagtgtggtcacattgcttacatacaaggtacataataaaatacttaccttctgactctcaaagatgaaatgaaatccatttctgactataaggtgcagtggacattaattgagatggtgcttatcaagcagtaaataatgttaaagtaaatatcagtttctttttcctacctatggattcaccctgaacccctctcattgccatttactgtcacatacagcaggagcagtggctagtgagatcttgaatgggctagctctgactcggaggtgtcagtgtaaaatatgggttgaatttcgaagacttggtattgaaaatatagattttttaattaataatttacattgacttgtcactgaagaaatcggccatactgtgttgaacaagatagtttgctgaagttgccctcagtgttctttaatgtggtctcccaacaatttaaatttttttgaggccagtgaggtggctcagtgggtaagggtgcttgccaccagctctgatgacctgcgtttgatcatgatctccaggatccacatgatagacggagagatccaactctctaaaattattctcaggcctctatatgtgcataaacacatgcatgttctccctatataaccccgtctcgcaaatggaaaagtaatgttgattcccattgggtttctattgactgtcattactctagatcacaaacgctaactccggggtctccagaaatccagcagggcacataagcgaggctagtcctggtgggatgttttgctctggggactgtgtacagatcccaaagattatggctgtctgtgctccacagactggtgtaatgctgggaaacaaggcagttgttgctggatcttccagctctcgagttagaaatgggcccattatctgaagtttgctgacttttaaacattaacaaccaagacacaacaggcccagtaccctgtgggccaagcagagctctgtgagcttgggctcaagcttgtgcctttactcacaagactagctatgtaagttgtccatttgtagagccttgatgtccctgacatgttgcttgaactgcttgttaacaatcggaaagggaaattgcacggctaatcttttctctttctctctctttaatacagaaagtccctttacagaatcctcccattaagtgggccgagggccataagggggtatttaatattgaagtgcaagctgtttcctccgttcacacccaggtaagggatggcaaggccggccactgtctgtctggttcatctgcgttgccctgtttcttgacagtgtaatacctacctcaccaacttcctagagcatgagttcaagcctgatttattggtgtttttattaatagatattaaagggccctattttgcgtaccacactctgcccaatgagtccattccctttgctgggagcatctgggactttgacttctaatccaagtcactggctaagggattgcaccaagctcctgggtgagtgttgaaagaataacacctcttgagagtcttctgccttctgccttcccaggataaccacctggagaagttcttcaccctttgccactccctggagagccaggtgaccttccctatccgcgtgctggaccagaagatcacggagaacacgctggagcatgagcttaagctcagcatcatctgcctcaactcctcccgcctggagcccctcgtgctcttcctccacctggtgctggataagctcttccagctctctgtgcagcccatggtcatcgctggccaaacaggtagagaggcctgtgggtagggaggaggcgtggccagatcaggcaggcaggcaggcaggcaggcaggcaggcaggcagatacacttttgcataatgaatcatggctttccacaaacccacaaatgctgggagcgacttttgcagcatttgacatgaagtcaggtccagttctgttttgtcagactccctagtgtttaaaaaagggaagggagaagggctggaggggtgggttagtcattcaaagcacttgctgctcttgcaaaaggcccaggttcaggtcccggaactcacatggttcacactacgtgtatctccaattcgaaggatctgatgccctcttgtgacccccccacaggtactgcattgacattacacatgcatacatgcagacaaaacactcgtatacatccaaaatataaataaaacaagtaagtgtaaaagaatggttgtgaaagaaaaggggatgcaggagtaagaaagaacattaaaatgggctttaggaccaaggagatggctctgtcttgatgctgtgtccaagcctgattgacggcgtgaagcaggtgcttgagatccacatggtagaaggggagtgctgactcccataagtttttgtctgaactccagatatgccccatctctctctctctctctctctctctctctctctctctctctctctctctctctctctcacacacacacacacacacacacacacacacacacacacacacacattaaaatgtcttttaaataggactttgttgggtggagctgtagttcaggtccttgctggtgatacttggggctcacgggccagccatcacagcctgcttgacaagttcaggcctgaatcaaaacaataaagcgaagaagaattgagggagacttccgctgtcagcatctggcctctgcacacacgtgcacacaggaacatactacgcaaatatgcacacgaaggcaatgaaggaattagtctacagccgttcatttggaccctgcttctgctcagtccagtgctgtggaaggcacagtatgggaagaaggaggcccagacaattgcgagggatgcactcggcctgggcatggtttccagcattcacggggaggctacatttaccaccaggcatagctacggaatgacatggtttggattcctatcactgtggggcactgccggcaggagactgagcttggaaggggcggcctggctttgtggtcagtgtaattttgtccaagtgaggaggacagcgtgagcaaagtcaggaatgaggaaagaccacagatggggataatctgactgctacctcactaggacatagcttgaatctgagcggaaacaggcacaaagttggctaaagccaaattatgaagggctcagagcagcagaccgatagggtacaggcagcttacatggacctgctatggagaatgacatatctgtgtgtgtttttaagaagtgtctctatgagaatctgttggaggacagatttatgcatttactcttacatccgttgggcatcctgttgaaatgcagattctggttcagctgatctggggtagggtcaaaggctcgagcccaaggtgatgctgttcatgtcagtgtggagaagccacccagttttcgactgagtttaggaagcaatgatataaggacatggacctaccctggcctgtgggaaactgtgctgtttgcagtggagagaaagaaggagatgtgagccaggcatggtgggctatgctaccatgcctataattctagctgaagcaggagcactgcagtgagttctgggccagcctgagctacaatacacagagggaactgagcatgcctgtgctgagcagatctagaaccccggatctgactagagcattcctgcctccatgggcatttcttttgcctggctaaggtgatcaagacgtaccgttatcagcccgagaacatgtacctcagtttctctttttctcttggctcctcagcaaacttctcccagtttgccttcgaatctgtggtggccattgccaatagccttcacaacagcaaggacctgaggaaggaccagcacgggaggaactgcctgctggcctcctatgtgcactacgtgttccggctgcccgagctgcacagggatgcacccaagtcaggtagtgctttctgggggtgcggggggcagggtatcacctcagaccactgccatgggatgaaaggttcagttttggtcatcagagtaaaacttacctgagtgctaaaattaaaagtttctagaggtttctccctccctcccttctctctatgttgtacttgctgtgtctgcctagtcggtaacttctcagtgacctttacccgactgccaatttatggtccccttgaggatctgcattaaaaggtggagagctgccgactgtaagattctagaacaacagcaaataaaacggtatctatcccacggcactgaccccactggaagttcttaaacttttcattacataaaaaagttctcgttctcccgagctaagttaataataacccattccactgttcttcttagttatttgcagagaccataaaccataatggctgggtagcctgatatataaaaacatcactggtagactctttaaatcccacatccaaataaatctggcaccttgttagcctctgcaatcatcttttacataactctgtaatttcagtccaattttaaaaccagagttggactcactttgaaatagtacatgtgcccgtcctcaaaagatgactgtggatgactcaattttgaacaaccctcctccaagacttggaagattgagtcattcaaatattgattaaacaaaaccattcgtgttcctccctactccacaccacctcacaccctgcccacttcacccaacaccacctccctgcccctcagagctgcagaataatgaggctccttccccaggccccatctggaaggtttacacacacaccccactcctccctcagtgggtctttctcaggctctgtaactgactgtctattggcttgtctctggctgctgggtacaggtggccccaccgccgtagtccctgacccccgataccacacatatggacgcacgtctgccgctgcagtgagttcaaagctgatgcaggcccgtgtgatgagcagcagtaacccagacctggctgggacacactgtgcagcagatgaggaggttaagaacatcatgtcttccaaggtaggggcatggccagccctggagggcacacgagctcttgtttttttcttagctgacatatgcatttctgggtgcaacatggtatcttgatatgtaagtactttgtatgttgatcgggtacttaggatccttccatcattccctggtggtaagaatgctaggcatgctcttttctcgctatttcaaagtatttgttgcagtgccgttggtcaccccctgtgcagtaccacactcctgctgaaccgtggcactggaaacactctctacttcctcacgttgacttcatgtatttgaattctcatgtagaccttccaagtgcttggaatctatcggttttcattcttaattggcccagagcagttagacgcgtccgtcgggtacagtatgatgtttccgtccctgaatacagtgtgtggtgattagacatccgtcactcagacgtccatcagtttttcatgctagaagcaattaaagtcctgtcttgtagctactagaaatagtcatttagttgttagcaacacagctgcagggactcagctctgctgttggtagtgttctacattgggatggtacatttgtctcagctgtgagccagtattcatgcacagttgccatgaacataagcttctactctattccagtttcctgtttccttaatgtcctttacttctaatctgtggtcgtctccagggcccacacagcatctttcggccatgtcttcttaagcccctcttgcatataacaatttcagggacttacttgtcattatcctgacagttcaatgactaatagatactttatttgggattttaaaaaccatgcagttcaggccaagctgtgatggcacaaacctttaatcccagcacttgggcggcagagacaggcagatctctgcgagttcaaggccagcctggtctacagagcaaattccagggcagcgagggctacacagagaaatctgtttcagaaaaaaagaaaataattccggtggcataattaacaggttcaattgtccggcaatagtggtgcacactttaatttcagcgctcgggaagcagaggcaggtggatctctgtgagtttgaagctagcctggtcgacagagcaaattccagtccagccaggctaaacagagaaactgtcttgaaaacccaaagacaaacaaaacaacaacccccccccccccccgcaaaaaaaaaaaacccaaaatattcaattcacatgcgtaatgttcggccctctaaagctcacaatccagtggacattagcatattcaaaagctgcactggctgtgttgctgctgctattgttgccacagaaagagcaaatgccccaaaggaatgcccagaaagctggttttaaacaggggcagcacttctgtggtttttatttgctgggcgagacaagattgtggctgttgctgacagccttgctctttatatttttgttaataaaaatgaaaatattaaatttctacatatgtgctgaggtcgagtttttctgattattttgtagtaggggatgaaattttagtcaaatagaatagagcatctagtcctttggtgtagtaccgcattaaaccacggtggggcactgttctcatttttttttttgccctgctctcctaacacaccgaaggaactgttggtacctgaatctttttgtgtcgtggggaattgggctatcgttcgtttttctgtctgtctgtctgtctgtctgtctgtctgtctgtctgtctgtctgtctatctacctgttttttaaacatgatttctttgtatagacctggctgtcttggagcttgctctgtagaccaggtttagccttttcaactcagaaattcaccagcttcctgtgctggggattaaagtcatgtgccaccgccacttagttcttttagatttttttgacatagcatctcactctgtaacccagattcgcctaggatttagtatgtaacgcagaccaaccttaaacccacagctattctcctgtcctggctcagcctcctaaatactaagtttgcaggtgggagccactgtgctcaatggccttactttgactttgtcaaatacttttataaaacatttgtttaatttatgtgtagaagggtttctgcgcgtatgcacactatgaacgtaccgtgtgccagaaaataccagaagaggtgttggttgtgagccgttatgtgagtgctgagaaccgaacccagtcctctgcaagagcagcaagcgctcttgagcattgggccagcatctctctacctctgtcggatgctttcacggagctgatcatgtgaacttgctagttcgaactgttaacgtggggtgggtatgtctggggcttttttgtttgttttttatttgtccatattcattgcacacatgatggtttttatagagtttcaaatagaccgaatgcatttaacgtccccctccatgccctccactagtccccttcttcccttctgctttaatttcataggcatttaacggactcgagtgtctatatataatctgtgcaccacaaacgagagaacacatgcaatatgtctgagtctggcttgcttcactcaacacaatggtcccctggtacacccattttctagcaaacaacgtaactttgctctctgtggctgaataagactccattgcgcgtgcacataaaacatcttctctacctctctatttgttagtaaaacagactctgaagctgtttccatggcttgactactgtgaatcgtgatgcagtaaatatggatgtgcacacctctctccagtgtgggactgagagcctttcgggtgcatagccacatggggttagctggtcagagggtagtgctgtttctagtatctgggcgcccgccatactcattccataacaattggacagcaacggcgtgagggctcacttccatccgccttcaccagcacttcattgacattcattttcttaacaaccattctcttttcagcccttattaagtctttgagaattttagacaagccctttcatgatattcaccccaactcctccaaggcctatctccctgcccacaccaaacttcatgtccttactttctggtttttgttgttgttttgttttgttttgttttgtgtttttaaataacccacagagtcaaatttgtgctgcatatatatatatacacatatatatgtatatatgtgtatatatatatgtatgcatatatgtgaatatatgtgtgtgtgtatatatatttttttttttaatggtccagagccatccactggagtgcggttactctggccccaaagccatcaactatccataactcctcctgaaccaagccttccctgttacgatggctctccccaatgagggcaacatattaatctcaatgatagtttctctaatgcttttacttttccctcctttttttttttttttttttttttttggtgggggaggatctagtgtccttattctgtatgtgatatccagttttcccagccccacctaaagaggctgtctttatccagtatgtttcaggctggccttgaactcctgacccacctgatttcacctcatgaggttggagttgccttttcctgatggctaaagatcctgtatgtgtttcttgtccagttattcatcatcttttgagaaccatctgttctttagcccctttatcgactgggttgttccatcattcggtgtttagtgccttgatacattctggatgttagtcctctgtcaaacgtagcaaaggctccctgtgggctgtctcttgttgcttcctgtgctgtacagaagctctttcattttgagaaatcccattcgtcagttcttgggattctttgcaaagagcatttgctgccattttgaagtgttttctccatgcctcgcccaaaccttcttggagtttcttatgttaaattcctccttccatttttaattgatgctcatacactgtaagagatgagagatgaggatttagttttctttttctacatgtgatatccagttttcctagcaccacttactgaagaggcttttttaatccaacatgtgtctcgggcgtcttcaccaagctccacatggccgtagctttgtgagtttaatcctgcctcttctatctgttctattggtaagtttgttgttgttgttgatcttcgtttccaaattttaacttatttatcatcatttctacattgttagtgagttctctttcctatcctgtattgacttccttttttacccaactgtttctttcttgtccccttaaatgtattcagaaatgtgcttgtgttgctagtgtggttggtcaatcttatacatagcctttttaaattcttcatctgggatctcatcttatttccttcctttggaacccattgctatagaactgctcatttttggaggagtcgtgatctttcaagtcttttatgtttctgcggtgggacttgaacctctgggattacgtattgatcggatttgttgattatctatttcatatgaaatattctatatctatccttcctactaggctggagctatacctcagtggttaagtcaaatcctcagaacacatgtttagggcatcgagcataatcttcaacatgggagtaatggtctctgtgcgatccctgtgtacacggtgtaaattgtctatataactagctatgtatggatgcaaactggctctgtggtcgcatacctggaagctggtgcacagtaccctgatgtagccacttgtttgactgcaggtgttgagccatttctatgtagcatctcactgtcccttctctgggtgtgtgggtatggcctcagccgggagcagaactcctgtggtatcctgcgtttcacatctatctttccactgtttgtcacacaaccagtgtggtttatgggccacagagtgagtgttttaactagagtagtctttcagtccgtgggtactggaagggactggcagctttctcctagtagtcaccctagtacctttaagcatttgctactatgttgggaacaaagagctacttagtcagttgatgttagacaacatggtttgacatggatagccaccatggaccaggatagctagtgctgggcatctgaggggctgtgagtcagcacaaagtggccagcaacagatgtccagggaacctaaaagtcagtggtgacctcgtcggccacttttgtgtcattctgtgtaaacatgagcacttcccttttgcctttctcttcactggcctgcctgtgtgtccatctatagacctgtgtgcctaccttcatgtggcccatatgcaggtttacctttgtgcttgtgcctgtgcctatgccagcctatgtgtggcccgtgtctgtcactgtgtgcctcggtgccttcaggcagctgcctacctagcaacgttcatggataaaggatatcttatctgccagtctcttcagccctctaggctcctaggactcctcttccccccaaccccggctccaaatcttggtcctcacacactacttgtccactcccggggagccgatgagtctcgctgcaatctgtggagttccttccacgcagaactccacacagttctgactcttcagagtgagctacgcagggaacccttgcccctaactcacaggagtgtttaaaatggcttgtcactgtgcatgtcagattccaacaaaagagacttttcctcgcaccaatctgttgtacagaccacaggatttccgtctggactgcgcctgctctcggtggtgtgtcctatgccgatcatgttcttggaagctcaggtgtccccctcctcctttgagctcaatctctcccgttggcaggtgcatatttgtccccacccccctcataaattgatggacacttaagagtgtaagagagtttttccagctctctttatcttaacctcagggtcctattcgctgggttgctctgggaatagggcactttccagtcaggagccaacgtgacctctgaactctctcctgttctgtttagtgagtggtttctctttctttgtcactgaagctggtgtgtgtcgttcgtctgtctgtttttgtcagcatccaagcaccctgctttatcccctaagaaaatccagtagtcagcgcttgggcttcgccatcctcccaaagttggttcctgtgttttaactatacttctgctccatgttgccgcacatcaatctgtcaccagtgactgtctcaggagcaagtgagataatttacttttctttgttttatatttatacatggctattatttcggttctagtacagaaaaggcgtaacatgtaatcaaaacaaagtctgaggttgtgatttccaggaagccgactcatcatggtttatatgtttcagattgctgatcgcaactgcagccggatgtcttactattgctctggcaacagtgacgttccaggttcaactgcagccccaaggccagtcagcaaaaaggtacacaccagggtggtgtggtggtaatcccagcacaagaaaggactcactggtgtcttcatgttgcaattgaaagtagacactaagttctttctttctgtttcctgcccagctaacacacacacacgcacacacacacacacacacacacacacacacacacacacacacacacagatttttgttttggtctattcatctgaattgcctggaaggttttgtaaactgttttgcagatcctttccccattgtttttaattcagtacatctgagctaggttcaaagaacttggattttgaacaaattaccagttggtactgattcagatatccaactttgagaaccctcgtgttcatctctttcttttttaagggacagtaagctagggaaagttcatcctaacaaaagcaagtggcaagaattagtatcatttcagtactacatacgtatgtaagtaatatgtcttcttgactaaatgaccttgactgagaccaagtgcattcagaaacaacttgagcagttccttgggatgacctttaattggcctcaaatctgaattcagaaaccatgctaagtaggaaatgcctgaaaccaacaaagtgccctggacagtactgtggacgtgttaaagagagacataggctctcaaaccagttgtctgtcatgtgtcctgtgccaggcacccaagaggttgaggtcctgattaccgtttgagatccttatttaagcatgggtccactaaccgcagttacacatgaagctgtttgcaatcgctaacagctcagggaagattttattatagagaggagagcacaagcctctgaatggctcactttggcctggaggagggaaggatgggaggtaccactgagccttagactgtaaagtaatccaggcactggatgtccgaaagatcttccagaagttaactctgagagggaaagtgacaggaatgtgtggttaggcccaaaactaacttgtcacctaccttaacatttagcattaagccgtcacagccactggttctaagttctgctttcctttaaaaactatattattaaaagctgaacatgtggcactttaacccccagcacttgggaagcattggcagggagatctctgtgagttcaagccagcctgatctacatagagagttctagaaaacaagagctgaatagtgagtcctgtctgcaaacgaaagaaaacactgaaacaatcaacatatttgcctaaagtctgacttccttagtgcagatcctgtttggttttgcggttggtggcttactttgtcccggaatgaccagaagggagtcagctttcttttcaaagggaaggttagccagtgtgttgccgccatagctcagccaaccattttgctgcttggctgtcttctctaacctctggagcaaggtgttcttacaataacactgtccagtaagcaacatgaattacattaagaagcagcttagcccagcctaatctcttcctgccataagactctggcagacagactgacctacttctagcggctactccaaggctggtggagcatgtctttcttctcctgggagggaggaagtgcagcacgctgtcctgcgctctgttggcaaccagcagggttaacacgtgcgactccacccctcccagatggcacagcctcacctaagactgcatcagcaaacagatgcgctcccgtacactgagattactgaggtttaaactgccccataacaagtgaagtcagtcagtgagcagaactcactgcagaaagtagctgcaacaccatgacatctgctcagagatttctccctgggcttcctcaaatcaaaaatagtcctcaaatgaaatgcctgtaagaactagtaaattgcagcgtgtgcaccccatcctgtggataatttgaaagtttgtcacgagcaatcactgttaccattgctctttgctttgggctgactttgagacttaacttccacataaggatgtggtatttggggttggggatttagctcagtggtagagcgcttgcctagcaagcacaaggccctgggttcggtccccagctccgaaaaaaaagaaaagaaaagaaaaaaaaagatgtgatatttgagtgccgaaatagtttttactctcccggctgctgaaaaaccgcagaagagtctgtctctttgtgtttattctaggctttgcacacatgtgtgagaggagtgaaagccaaagaaatcctggccaacgcttttgccttttgtttgtacggcactgtcttgatttgcccagctccgagcaggtccccaagaccaagggctgtccacattgagagcagagaagttatcaagcaaaccaaaatgagttattagttttacttttgatccccagcttcttcccttttaaaatttttgggacatgcgaggaattgcccaaccttgaaggcttttgggtaccatctagacggtggtcctcagagtgtggcatcatattccccgcagcagccgcatcccctggggaacttgataggatgcaaattctcagcccctgctagaccttctgatcagactccctgaggatggcaccagccgtctgagtgttacttgaggatcgtacagaccagcaacccagttttgtgagagagcaaagtaactaagagcagagagaggaatgcactgcgtggtcagcgggacattgagagtcatttctctctaacataacaccgacagtgccacccaggagagctgccccgtagaatgcaactgttactctaagccgccgccctcctacgtgttatttccgtactgactttgccacctgtcatatggcctggggtaccttggacatatgcctctgagctattgtcagctcttgcatgagaagagaaggaaaggggggattagagggtaatagttaaccttgccttcctcacagcctggtttttgtctgtttgttgtttagcatttccatgaggagcttgccctgcagatggtggtcagcactggactagtgagagaaaccgtcttcaagtacgcctggttcttctttgagcttctggtgagattcttgtgtttgtatccatgctcggcggggcaagcaaagcacacatgggaaaggcagtttcctgtgtcaggacctaaccctaagcctaggattgtgccttgaaacgcagctgttcttcaccctctgtccatcttccaacaaactttatcgactttacagtaaacaaccatcgggtttgcatctcctcatggttcctacctgatcaagttgccatcattcctcttgagtctcttgaggcatcttccttttcatctcagcccctctgtcccaccccaggcagccagtgtcatacagactgtgtccatctctgcagttttcagaatgctagaataaagtgccttttttaaaaaaatcatagttaaaatgcccttgtacagtcctaatgtgtacctgcgtgtcatgccgtggtcccctcatttaaccacatggggcccccttttagttcctgggaaataccaggcctggcctttttaacttaaagctctttttaaattccctctcacaaactaccgtttactacccatcctcaacacactttctgttctgtcctctggctcccttctctggctgccttgctctgtaatggtgtttccactttactccactgtaaactctcctcttggagaccccatttacctcttactagcactatattcaatttgccattgttttctgtctcatctactggatttctaggatgttatccatcttcattatttaatgcttgctatcgtacaagcagtaaccagcaacactaatagtagttgggaggaataggaaatctctgtgtgtgcgtgtgtgtgtgtgtgtgtgtgtgtgtgtgtgtgtgtgtttatatgtgtatgtatatctaaaagtcaatactgcagactaaaaaaaaacctcaaaagaactaaatttgccttaatgaaaggtgtcttaattattaactcacacatttgcactcacacacacttcctctaaccactcttagatcttaggcagcaccctacttgtgggaaaagcaccaaaactcaggcccaactatgtgagggttccaggggtaactctgtaggctctcagtccatccttgaaatcctatgggagccctgcttctcctcatagcacacatcagggctagagagatttgccgtgttgctcagtcaggggcgagtggagcctcctctaactctcacgtctgtgttctttctattcactatttccctcttggagaagctcagagtttgagaacatctcagcccatcgtagtgaccaacagtaggctaacccatcccacccagttagaacactgtgtggcttattcggtcccctattatcatgagctcagctccagtggttccacagagcatcctgcagctccattttaaaagcaggtttgttttcgatgaagaaacagcaatgactctgtctagtaagtaaccccagtagtagctggcacctctgacaaaagaaaaatgacatcctatgtgaattgagcaacttatgtatgccagctactgcctcaactatttttaaagcattgtctcatttaatcttcctgcagccttgattcagggtctttatgattctgcacttgcaggtgaggttaggggaaggacagtggccacagaagagcgtccaggtctgtctagggtgtggtcgtcattgcttataagtacacggggctaaggatcacagaaaaggtgaaaattgcttctaatgggtgtaattgttcactaagacttgtttggcccaagagaaagggacatctaaagttaatatgccccccttacctttaggacccccttatgctacagagatgacatggcttagaaaagttcccatggatcaaagcactttgaaggggttggtccaaaggcaggcccaccaagacagcagatacagggctctacagactgtggccactctgtcagggtcgcgacagctgagaagcatttatcacaaggcctctccccagggtgtctgccgtgttgcaggagccaacagagactagagagacacccagcctcgttctgaggaatcagagagaaggggcagagcagttggggcatagagaaatctagaggcagagaagaggatccacccagcaggggctggagccccagaaaaacattgatactgccaggaccactctgtggcagtaggagtgacacatggctaaacctttcgccattgacctcaggcttcagcctcctggtcaccagtacagccagaagccaaaggaaaatggagaaggggccattgctacagtgtacagacacgtcctgaacattcacacatggagaagggcaagaagccacgttgggggtgggagttgtggtggacatagaaagaccattgggctggagagatggttcagtggttagagcactgactgctcttccaaaagtcctgagttcaattcccagcaaccacatggtggctcacaaccatctataatgggatccagtgccctcttctgatgtgtctgaagacagctacagtgtacttacatataataaataaatcttagaaaggaagaaagaaagaaagaaagaaagaaagaaagaaagaaagaaagaagagagagagagagagaaagaaagaaagaaagaaagaaagaaagaaagaaagaaagaaagatagatagatagacagacagacagagacagaccatcaatcccagacccagacaacacctcagtcctcctcgccttgttgcagacttacctgactgattctcaggaagcctgaagagaacagctcccccttggctcaggcagcagggggcagtttgacacctccagctgcgctggccactgggcgctaatgaacagtgactttgtcacaggagccagtacacttagtccttgggtgccctcacacattttaatgagtgagccctgtgctcagaccttggaggctgggaggtaaataggtgacctagttcacttcctctggacatgtcaccctgcacgagggggttctgaaaggtgtccattctcagaacggagcacagaggggcaaatgcgggggaaattatttttctacctcaccaaaccctgcaagtgggtgaagccccactgatatttttgccgggttcttcagtgaagagtcagggatacaggagctggcaggttgctggcagtctggacgtaggccatcggtgggaagtacgattgtgaggattatttatttggtcgtgggatggccaaactcaacaggcaggagccgaatgcaacagagttcaacaggctggcgctggggtgggttagccagcagaggctcaggattggggtcacccggacaaagaatccttgtgttcccaggcccttggctggaagtacagtgagagagatactcttgtctaacaaaagtatctctgttcaggtcgtctcgttcaggtcgtctccccgtgtgggtgtgcatctctgggactatgaatatgtctgtgtgacctgagctagaaagtacctttaggctaggagaaaccatggttcttccattggattttctgtggttggctctgccctgagctagtcagggtagtatctgaaacacggatcaggaggccgcttcagtcctttcctcctgcattgcctcctctctgtttgtaccttgtttgtctcggtcttgacaggtttatgtttcgagaaacagaaccctgctgtttgtgtacaaagggttccatgctgttgttcagaacagaagccaatttccaagacgccagatggggcagatgtgggtgggtcagctccaaaggatattccttttctgtcgttggactatttatttgtttgcttggtgcgtgcgtgtgtgtgtgtgtggtgtgtgtgtgtgtggtgtctgtgtgtgtctgtgtgtgtgtggtgtgtgtgtgtctgtgtgtgtgtggtgtgtgtgtgtgtggtgtgtgtgtctgtgtgtgtgtctgtgtgtgtgtgtgtggtgtgtgtatgtgtggtgtgtgtatgtgtgtgtgtgtgtggtgtgtgtgtggtgtatgtgtgtgtctgtgtgtgtgtctgtgtgtgtgtggtgtgtgtgtgtgtggtgtgtgtgtgtgtagtgtgtgtgtgtgtggtgtgtgtatgtatgtggtgtgtgtgtgtggtgtgtgtgtggtgtgtgtgtgtggtgtgtgtgtgtaagtgtgtgtgtgtctgtgtctgtgtgtgtgtctgtgtctgtgtgtgtgtctgtgtgtgtgtgtgtggtgtgtgtgtctgtgtgtggtgtgtgtgtgtgtgtggtgtgtgtgtgtggtgtgtgtgtgtggtgtgtgtgtggtgtgtgtgtgtgtggtgtctgtgtgtgtctgtgtgtgtgtggtgtgtgtggtgtgtgtgtgtggtgtgtgtgtgtgtaagtgtgtgtgtgtggtatgtgtgtgtaagtgtgtgtgtgtctgtgtctgtgtgtnnnnnnntctnnnnnnnnnnnnnnnnnnnnnnnnnnnnnnnnnntntnncnnnnnnnnnnnnnnnnnnnnnnnnnnnnnnnnnnnnnnnnnnnnnnnnnnnnnnnnnnnnnnnnnnnnnnnnnnnnnnnnnnnnnnnnnnnnnnnnnnnnnnnnnnnnnnnnnnnnnnnnnnnnnnnnnnnnnnnnnnnnnnnnnnnnnnnnnnnnnnnnnnnnnnnnnnnnnnnnnnnnnnnnnnnnnnnnnnnnnnnnnnnnnnnnnnnnnnnnnnnnnnnnnnnnnnnnnnnnnnnnnnnnnnnnnnnnnnnnnnnnnnnnnnnnnnnnnnnnnnnnnnnnnnnnnnnnnnnnnnnnnnnnnnnnnnnnnnnnnnnnnnnnnnnnnnnnnnnnnnnnnnnnnnnnnnnnnnnnnnnnnnnnnnnnnnnnnnnnnnnnnnnnnnnnnnnnnnnnnnnnnnnnnnnnnnnnnnnnnnnnnnnnnnnnnnnnnnnnnnnnnnnnnnnnnnnnnnnnnnnnnnnnnnnnnnnnnnnnnnnnnnnnnnnnnnnnnnnnnnnnnnnnnnnnnnnnnnnnnnnnnnnnnnnnnnnnnnnnnnnnnnnnnnnnnnnnnnnnnnnnnnnnnnnnnnnnnnnnnnnnnnnnnnnnnnnnnnnnnnnnnnnnnnnnnnnnnnnnnnnnnnnnnnnnnnnnnnnnnnnnnnnnnnnnnnnnnnnnnnnnnnnnnnnnnnnnnnnnnnnnnnnnnnnnnnnnnnnnnnnnnnnnnnnnnnnnnnnnnnnnnnnnnnnnnnnnnnnnnnnnnnnnnnnnnnnnnnnnnnnnnnnnnnnnnnnnnnnnnnnnnnnnnnnnnnnnnnnnnnnnnnnnnnnnnnnnnnnnnnnnnnnnnnnnnnnnnnnnnnnnnnnnnnnnnnnnnnnnnnnnnnnnnnnnnnnnnnnnnnnnnnnnnnnnnnnnnnnnnnnnnnnnnnnnnnnnnnnnnnnnnnnnnnnnnnnnnnnnnnnnnnnnnnnnnnnnnnnnnnnnnnnnnnnnnnnnnnnnnnnnnnnnnnnnnnnnnnnnnnnnnnnnnnnnnnnnnnnnnnnnnnnnnnnnnnnnnnnnnnnnnnnnnnnnnnnnnnnnnnnnnnnnnnnnnnnnnnnnnnnnnnnnnnnnnnnnnnnnnnnnnnnnnnnntnnnnnnnnnnnnngnnnttgngnnnnnnnnnnnnnnnngnnnnnnnnnnnnnnnnnnnnnnnnnnnnnnnntgtagtgtgtgtgtgtggtgtgtgtatgtgtgtggtgtatgtgtgtgtggtgtgtgtgtgtgtgtgtgttacttgtactggctgaagtctttgcttgcttgctttgaggcagggtctcactttgtagccctggctgacctggaacttactatggagaccagtcagactttgaactggtagtaattctcctgcatccagccatctcttgggtgctgggattgcaggtaggtgccaccaggcccagctgacaattgctttttgctgccatgctctgactagcctgcacaaattcatgaacttgatttcaggatgtcaggatgtggccatgagaaatcccagtgtggtggatacttggcctgtttctctgataaaatattctgaggaaaagaagaaagaaaggaaggaaggcaggaagggggaagcaaaggaaggaaggaaggacagacaggtaggtttatatcggctcacaattcgatgacacagtccatcagggtaggggtgtcatgttgacacattgcatccacagtcagaaaacagcattgtgagtgctgtgctcagctgcctttctccgttttattcagtctggacaccagccgtggagtagcactactcatgctactcacagtggacaggacctcctgactccagttaacctaatcatgccccacaggcttatctccgaggtgatgtccgatcctgtcaagttgacagctggcagaaaccaccaccccaatcttcccagtcagggtgtcacaaatagctctcagcaaactcaccccctctaagactccacctctgatgatgccagaggatgaccctggaaatctcctgacccaggaggaacccaaaaattaaacatgatctagattttaaaatagcaggcataaactggtattatactagttactaattgattgatagattggttaactataacttagacttaagaaactcaaaacataattttccctagaagctgagccaacatgggcttcataaggagtcccatctcagacacacatttatattctcctaaggcagcattctacgtaatagttaaacttctggatagccaacaaaaccctgatcatcccataatatagttcacattttaattttctagcccaaatgaactcaatcggaactatagaattactttagaaaaaaatgtttgatttttaaatttaatataggagagacctttcccctttattctccttactgtagtttcagagaaagaagactttatgtccagacagcattatacagtagtgcctgtgtgtcttgtatcatatactgtaacaacctgtgtgcttcttttttttttttttttcttttctttcccttttttcggagcaggggaccgaacccagggccttgcgcttcctaagcaagcgctctaccactgagctaaatccccaaccccaacctgtgtgcttctgaggacccagcctccctctgcctccaggacagaggggggcaattgaagagggctggtgtcttctgacaccaggctaatctgttaagctccaggttttgccagcagcaggaaaggagccccctgacttggggtcaacaagaggacacactgcccacctccagccaccatggtaaccattctgtgtgtcggaagcattttgttgtagttcagagccatcttaaccaccaccagcaccaataaagtatcagaaagtccacagtgaaagatttccttcaagccattcccccttgtgtacgttgtacaagcgcgtcaccaatccctgctgacattgtcccattcctccgtaggtgaaaagcatggcacagtacgtccataacctggataaacgggacagttttcggaggactcgtttttccgaccgcttcaaggatgacataactaccattgttaatgtggtcacctcggagatagcagcccttctagtgaaacctcagaaggtaaccaaccgtgcattcccactttataaatcgtttgccttgaccacgtcactttaataagcagaaaaaaataaacctcactggaaaactagttaaaatatgcgggaccgaactctggggtgtggctggagactgctgtaaagacgtcgcaattcgatttatcatttaagtgattttgtcagagaaaatagtcctgccctcgggatccagtctgcagtttaatggagccaatagtggatgtttgccgtctacttgaaaatgatttaaaaaatctacttctgtacagggagaatgagggcagcagtttgtaagatgtaaagtactggtgtcttgtgggtaggatttttgtaccagtctatagcttgaaatcatttcacaattaaagtttaaaactaaatatagctcagaatgtagtgggccagcaagctggctcggagaatgagggtacaacttgccgccaagcctgatggacctaagtccagccccccaaaacctgtgtgatgaaagtggggaaccagctcttgcatttgtctcctgatcttcacagcgcaccacaaatacatgtgactctagttttttatttatttatatttataattatttatttatttagagatatggggtcttactatgtagctatgaaattcactatgtaaaaaaatcccataactaagagtaccgtgaaataataagagaaataaaacagaaaaaccatacaaaaacaaaaactagcctggctccaatttttgaaaaaaaaaaatcaccctcccaagtgtaactgacgtctttcagaccgagaaccctgcctaattggaaaagaaacaattcctaagcgtttttatcctgactggattttttttttaataatccttgcaaattaagacgttctctcccgggggctggaggaatggccccgcagttataaacccttacagagaagaccagaccaggtttggttcccctcaaaaaaccatgcgatgggcttacaaatcttcactcatacacataaaatgaataaggctaaaatgtgttttaaatctatctctttgaagatagtggatgcttctcaagttagtttgcacactccaccccaaccaaaaggtatttagccagaagccgggtgtccgacgcctttaatcccggcactgagaaggcagagcaggcagaactctgagttcaaggcaggcctggtctacagagtgagttccaggacagatagggacacagagaaaccctgtctcaaaagggaaaaaataaaataaaaacaaaaaaaaatactgaaaatgaacaaaattgcccaggtatggtagcacatgtttatatgctcagaattcaggaggctgaggtaagaggacgagaaacccaaagccagcctgcgttacatagtaagacgacatgggaataaacccaaacaaggagaagtttaagttaaaagtatctttattaattaaataaaactttaaaaatgtaaaacttcacagccccccaattgtctatatggaatggggttgatcatacacctctaattttgcgtgtacaaaacaagacagacggaaaacaatacgtctagaattaaacttcacccagagggatggtgggttaataggatagtctcttcccctcccagtgttcacaccagggacccggtggttccaacccagggttaaaccgtatgacgtgtgctggctttacaggaaagtgagcaggccgagaagatcaacatcagcctggccttcttcctgtatgacctcctctcaatcatggacagaggcttcgtgttcaacctcatcaagcattactgcactcaggtgagcgccctggagcggccgcttcagcccctccccactcactgcttaggtaacagagcactgcctccctcagtgggacccccacactgcacatcttggactgtcactgtctgtagggtgtgcaggttcttcagccacagtggatcgcctgcacccctggagcatgcaccaaagcagtcagtcagcaagtcagtctgaggaaacggaattttctcagcagtgtggtttcctccagttaacatttaagagacatcccaggacggtgcatttaacctttgatcagggcattcagagtttgagactggttacagtggcttcatgcgcaagcatgaggaccagtttagagccacagcacccaccaagaagctggtggtgtaagcctctcaccccagtgttcctagagacagacattggaagtggagctaaggcagatcccaagggcttgctggaaagccatagaggaaagcacttgacattcttctgacctgcagatcacacacacacacacacacacacacacacacacacagagggagggagaggggagaaaatatgagatttcttttcagtcattagaattattaattcaggggctggggatttagctcagtggtagagcgcttgcctagcaagcgcaaggccttgggtttggtcctcagctccggaaaaaaatattattaattaaattatgggttgaggttctaatcttaaaaaacaaacaaacaaaaacaacacctgataaactcagatggactttccaggagcatgaagcacatatttgttcaatgcagcacgagtgataacttccccaggggtttgtcgtggttgttttgagacagtctcactatgtaactctgcccgtcctagaactatgtaaaccaggcacacagagatcagcttaccctgtgtcccgagtgatgggatgaaaggcatgggccaccttgcccagctttctcccctaaagttttgagcatagttctttcttgactgtcccgtttagaatgtcctaacaataggaatataaacatcagatattgttgctacgcctcttcttccgtatttcttctcttcaccacggccaatatgtctgccgctatttaccacagtagtaacaaccaccatccctctccccaccccaggctgtcatccctggactcagaagagttagtaatgtaatggctttaaaatgctcccatttctgtgcctctcagttttcttgtttgcaaaatgcaaggactctcctctgtggggctttgagggctacggtgctttatcaaggagaaagatgtgagcagaagagacacaagagaaaaagtccatccggaggcttccagcaagaagccaccatccaggagaaccaggggtggccaaagctcaggctcttgtgtgtgtgtgtgtgtgtgtgtgtgtgtgtgtgtgtgtgtgtgtgtgtgcgcgcgcgcgtgcgtgtctgtctgtctgtctctgtgtgtctcttttgtctgtgtgcctctgtctaactctctgtgtgttcctgtctatctctgtgtgtgtgtcttctctgtgtgtctgtgtagtgggtgacccatccctctgcagcacagtaggaatctgggtcaggttgctggagggacggtaggctctaccttctcagtaggaaacagctgcatatcaagggctcgtgagctctgcaaagtaggagctaagggctggaaatctgtttgggtttgagctgctcttgactttttggttgtgagcctagcctttaacagccgaatcacctccacaacccgttgagctgctctttgaaaagaaatagaggaagaccctcgactttgtaaacccattgcccttgctcggggtctcataggaaatatgagaggcagctgcacagaggtccgtcagattcttgctcggaacaactactgcacagagctgcacagtgagcgctccgcagatactgatggtgcttacataatttaaaacacttaatttgttaattagttaatcataaattctgcttaaaactataaagcggctaactttaatcccagcattcatggagacagaagtatgtggatctctgtgagttcaaggccagcctggtctttatagagtttctggccagccaaggctacatagcaaatccttgtcttaaaaaaggcagacgatccctaccaagcgatttcttcttaactaaaaattatagagtgtattatatgaaactaaagatacagcattctagcaatattattaaataatttagctacagtgcttttaagtattaaattatatatcaaacagctaatgtgcatttgaagttataagtaaggcatattttagaggtatattaataattccttaatttgcagatttcttatttatgaagttagaatagtttgaatttttctgtacattttcttttcttcttccactacacaatgcattattttataattataaaataaaaatacactccctaagaaagtttctttttttgggggggggttctttttttcggagctggggaccgaacccagggccttgcgcttcctaggtaagcgctctaccactgagctaaatccccagcccccctaagaaagtttctaaacataatttttgttaaattaggacagaatgttaacttcagatatttgaaaaaaaatcctaagtaaatgtggacaaagtattatgggtcaaataatttttaatacaaatattaataatagatctgtccattttacaactaaattttgaaagcattaaaagccattcataaactttcatgccctaaaaacttggagattaattcaaattgacaagttttggaacagtcaagaaaagatagctgattttaatatcagccctttaaaaaaggatggaggttttggtaagaaatattagtataagcattagtcataaacattgatgctttgaaaattctttcaagaaaatatgaaatactggctgtctaaatccattcagggcatgggagatcagagttaacattaaaacgttttctgtttcctatgctaccatgttcaaaacaggaatataacacatatttgacaacacgctttcataaaagggaatcctaaattaccaggcttggtattactttattctgtttctcatactctctcaaatcatcagagggaatgacttctgatgtattggaaatccccttacgtgctcaaaagtcttgggggggggggttgtattcaaataaccgatgtcaactttggtgtatgttggtatggcagataagtcggtagtgaggaagcatgcggtttagagccaacacagggagatggtccctggcttgtttatataacacccctttccaagccaaatcaacccccaagtttcccagagcagcagggatgggcaactgtgtggggtggggcctcttttcttccaaaataaaagtaaggccacccacagcacacagcctcctaccatgcgcaatgctgtcttccactgtcgcttgtcacttcttggtggcagttaggcacagttgaattttcagagaatgtgtccagctgccggagccatacctcaagcttactttcaggtttgctgtggcgttgagtagatgccctaaggtcggggcaagggctcccatttggggccggggcctgctgttaagaatagtatcgaataacagttggctggagctccaggagtggcatttgttgctctctcaagttaacctttactccagttggtgtctagctgtgcagaggaagaatgtgttagtgcctgttaaagtctgttctagttaccttacactaaacattcctgtaaacatgtctctttcctttcagctatcagccaagcttaacacccttccaaccctcatttccatgcggctggagttcctgagaatcctctgcagccacgagcactacctcaacttgaacctgctcttcatgaatcctgacaccgcaccagcctctccctgtccctccatatcctcccaggtagtctgccaactacaggaaaggcgcaagctacttcattaattagcttcgttcaatcacgcatctcctataaaggttgctcttactaattagaggaaaatcacgctattcaaaccagatcgcttgatccagatgtgggctttagggttccctgaagccatagcatctgaggtgaccatttacaaatcgagtaatttggcccaagggtccctgatgaggctaaccgtgtaggaagaaagctgtaagcctccaaaaccaaagaaactcgggtctcaagtcctccttcttcgacattaaccaattgttgcacaaatatagtgtgtaaatacaggcttagtatatttgcacatgcagggttccaaagtcaagcaagttttggaaccactgtgctagcctggtttctttgtcagacatcttacaaagaaagtccaggagggggagggcatgagaagtagattcccgacacggtctaacctgaccgtgggaatgtccttactgcctccgcaccagaggtttctcaaggaattatcgtcctctagaaaaccctcaaggaggggttggggatttagctcagtggtagagtgcttgcctagcaagcgcaaggccctgggttcggtccccagctctggaaaaaaaaaaaaagaaaaagaaagaaagaaaaccctcaaggaaatgctattttacagccccaatctctcaggatggtgttagactctagtctgctgcgtacccttggtgcaaagggaaaggcgtgtctaatgctggggttaacgtgaagtgcagggggaagcaccttagttctaagactaagaggacggggcaggggaggggaaaggggaagggggattgcttgggcccaagagttagttctagatcagcctgagcattatagtgaagcctcagtttaaaaaataataataataataataggaagaagaagaagaggaagaggaagaggaagaggaagaagaagaagaagaagaagaagaagaagaagaagaagaagaagaagaagaagaagaagaagaagaagaagaagaagaagaagaagaagaagacgacgacgacgacgaccaagaccaagaccaagaccaagaccaagaccaagaccaagaccaagaccagaagaagaacaggaagaacaaaacaacaagaagtcagcttagctatttgtgccagatgatatacccgaggctagccccatgaccattataatgtgattccgaatgtatttattatctgtctgctgtagtctgctctgtgggctgaagcctataacttccccatgctgaccttgccctgggtcctcctcccatgctcctcttctggctgccccaaggagttgacagatccagggccccttctcagcaaagctccaggacttgcagggacatttacttctgctgttcctggtgaagggtgacatgctcctgaagtaagaacacagggcaggagtggcctaggactgccaactctggcattttcatagcaaacaccacttctggcgccaggctagcagcatccagacacttgcttagacgaccttcagaaggggtgctgggaaaacagaccatggctcggggctgggcacagtccttatttctctgtgtacttacttcctgggctgctcatctgcaacttttgatatcagacaggcaaggaggggattaactagttgtcattagttctgttttcattttgctgttctggtaacctggtgatgttaggtacatgttctcccactgagcctgacccctagttagcttctcagccgaacccgagtaccccattttcatgttcatgttggtcagtcagtgcatgcactgtctggccagaactccataaatgcgccagcactgttttaattgcagcccttaaccctcataaagctgtcatctgtgtttctgcagaactcaagctcctgctccagtttccaggaccaaaagattgccagcatgttcgatctgaccccagagtaccgccagcagcacttcctcacagggctcctcttcacagaactggccgttgccctggatgctgaaggggacgggtaagtggcctaaaacggaacctgaagggaaaaaggttaatagcgtttccagttcaacttcttttttttttttttttaataaaaaaaattgtatttacttagaagcattcagaatgtcaacaaaacagccgccatttttttgcaattacagagtggtattcagttaacagaacaacaattaccttcgtataagctgcatcagagacaactgaagatggaaaaaaaaaacaaaaggaaaaaaaacaaaaacaaaaaaaaaagaaaccaaaaaccaaactactgtccccatatataactaatttgtgctgtgcaccaacaagaacctgctttaatttccatgccaatttacaacccccagactgtaccaggcaaggttagtggctattgaaaataccaccaggacagggctagctaaagacacattcggtagtgtgttaactatacaaaaaaagacactgtacagtttaaaaacaaatcttacacagccttacatttcaatttttttctttaaaaggagtgagttgtgtacaggggggttaaatgctttatagacaagaaaaaaaaactgcgctagaaccaacttattcatcatcatcttcttcttcttcatcttcgtcttcctcttcttcctcctcttcctcatcctcttcatcctcctcgtcgtcttcctcttccttctttttcttgctcttctcagccttgaccaccccctttttcgctgcatcaggttttcctttagctctgtaggcagcaatatccttctcatacttctccttcagcttggcggccttcttttcatagggctgcttgtcatccgcagcagtgttgttccacatctctcctagtttcttcgcaacatcaccaatggataagccaggatgctcgcctttgatttttgggcggtactcagaacagaacaagaagaaggccgaaggaggcctcttgggggcattggggtccttgaacttctttttggtctcccctttgggggggatgtaggttttcatttctctttcataacgagccttgtcagcctttgccatatcttcaaatttccccttttctttagcagacatggtcttccacctctctgagcacttcttggagaactctgagaagttgacagaagcatccgggtgcttcttcttgtgctcctcccggcaggtttgcacaaagaatgcatatgaggacattttgcctctcggcttcttaggatctcctttgcccatgtttagttgattttcctccgcgaggcacagagtcgcccagtgcccgtccggctctcgcttgccccggcgctgtctctatggagctcaatgtactgcaatggctcccagttcaacttcttatgtatacagcaagaccccagaactttaccacttgccagttttaagaagggctcctgtcttgagaaaatggtgcccatgaagtatagaggggaaaggggattagaggagccgtgaaaggaacttgtttttacagcactgggaattgaacccagagcctcccacatagcaggtaagcactctaccgctgaggcacgtccccagccccaaatttctattgtttgtttgtttctgattttcatgacaagagtttctctgtgtagtcctgactgtcctagaactcactttgtagaccaggcttacctcaaactcagagatccacctgcttgtgcctcccaagcactgggattaaaggtgtgtaccaccaccatacctgcctcaaaatgacttcatttattttttttaaagatttatttatatttatatgagtaaattgcagatgtcttcagacaaacaccagaagagtacattggattccgttacagatgattgtgagccaccatgtagttgctgggatttgaactcaggacctctggaagagcagtcagtgctcttaactgctgagccatctctccagctatcaaaatgacttctaacagtccctcgtttgagcagaatttgcagagaatgttttgctcagtgaattccccagggcaaacccattttgcaggggaagctgctgaggtggaacccagggctttgtacacgctgagcatgggctccttcactaagctctaccatcagccctaacaaggtcacctctgacaaagtgagcacacagaggggaaataccagaatgccgctgtccaaggctggcaaaggaagcgacagttaagaaggcagctgtcctatgtctaggttacactttctatggactagccttcccaaacaaagacagaggccggaggcctgggtcttgtgaatcttccactgtccgtacctgggcatctgaacacatagcagtacccagccttacttgttggctcatggcttatattctgtcatcttctctccgctctaactaaagtccaattttctcagaatttcttgtcctataactaacatattttctcagcaacacaaagcgccctgggatatgtgctgacaaggtcccgaaagaaggaaatttgaacacagaagaatttgccttttgatatgaacacccccatcttcatcttcttgattgtttttaataaataatagacctttaataatttctgaaagtaccatctgtattcacattagcggtagtttttagttttctatttttgttccagttggaacagaacccctggcatctggttttgatccttgtaaagtcgttgctgggatatcctgcatagcttagctgttttggggcttcaccatggaaactagactggcctcaaacttacagagatccccctgcctctgccccctgagtactggaatcaaagccatgcaccaccatgcccagctcctaattttttttttgaagagcattttcccaaagaaaatgtggtcataagcacacaaaaagatgttctgaatcgctaatggtcaggcaatgcttcattaaaagtgattaaatatcacatcctgcctactaggacagttatgatcaaaaatacagacaggtagagctgtggctaagtggcagaccacttctctagcatgtgttaagacctgggttcaacacccacccccaactccagcaattttaaaagaagaaaaagaatatggtgacaaaagaaaaaagaaaagactcagacacagctggtaggagggcaacatggttctttagagataaaactggagttctacttccagtagtttgactgaggtgtatgcccaagagatacatacttactccacaggaaaaaccagaagcattcttcatctgtgatagttctaaaatagaaacaactcaaacgttcatcaattgatggatggataaatgaaagtattttctgtgcacaatgaatcgttactcagtatccaagaggaatgaagtatgtatacaatatgataatgaacttgagaacagcaagctgaagactagaccatggttgtaacagattgtctactctgtgttgcctgcttttcacattgtcactgaattgtccccgatccctttgtactctggtttaagagcacagggcctccctcaccatagcccggtttctctgtgttatgtcaacagaattagcagagtacagagaaaagccgtgagtgccatccacagccttctgagttctcacgacctggatccacggtgtctcaaaccagaagtgaaagtcaaaatcgctgccctttacctgccgttggtcggcatcattctggatgcgctgccacagctctatgactttacaggtaaggatctgtttcctgtcttagattagggaggccctgccagatgcctctcgcacaggaaacaggggctctcatcagctgggaggtgcctcacagcagtgaccaccaaagcgttttctgacccagacaggttttttaagacacataattatatggggtcctttttgttcatcatttcattgatctgctagtttatgattgtcactaactgaaccaaaacgatgagctataacagaactaaccattctcatttaggatcactactctgttaccttcaaataaacatgctccttctctttagtgaggcttacaaggaagtacctgaaatcaagcaactttttgctctataccaaccaaccgacacacaatccaaggtgcctttcagtattaggaaattatgccacagcagagaatggtttgattttgtcaacaagaggtccattgtttgactacaagaaaaaaagcacaaatttaaaaaaaaaaatcccactgcttggctttctgttcctattatagtgtggagcagagaatatgggtgagagtccagcatcccagttacttccgagcagtccttgctctgtgagattgcagaggttaccatgctgggttttgctgatgaatgagctagagtctagagagtgcctgcctgagcccagccatccttaccaggcagtcgccagtgagttagagaaccatctgagccatgaacccgtgagccttagagaactatgccacttcctccaagtgcagtggcatgcttgactaaatcgtttgtaaagtcatgacaataacaattatttagttcattaaacaataagactgggtttagggagatagcttagtaaagaccttcccatccacgggtatctgcattcaatttccagaactcacataaaaatctctgacatgtgatatacacttgtgatcccagcactggaaggatgtgacaggaagatccttgggaacaatctagtcagtcagccagggaaagcaaaggaacaaaggttttgtgcctgaggaataaaacccaaagtcctctcctgcacatgtatagtctcacacccttcatatacaaacatacacacaagagagaccaatcgcctagaacctttcattcatgcacaccgtagagtggaaagcaagcattcttgtagaagtagttatttctcttctttattaaaaacaacaacaaaaattcctgctgtaaatcagcaaggagaaagctcagcagttaatagctcctgcttctcttgcagaggacccgggttctgttccctgcaccttcaatgtggcctgcaactgcctgtaactccagggccagaggacttgagccctctcctgccctccccaaatgcccgagcatatacatgcatgcagatatatgcaggcactaatgccaacacataaagattttttaaaaagcaatttgtttttctttttaaagatacatctcatggggctggagagattggagagacagttccatgtttaaaagaactggctgctcttccagaggacccaggatcaattcccagcatccacgtggcagctcatagctgcctgtaactctggttccaagggatctaatgccccattctagcctcttagggctcaagcatgaaagtggcatacagacttacatataacaaaacaccaatttttttaaattaaaaatgttaaagatacatctaaaattcagacttcagccccatccgttaccataagcgacctttgacgagtttggcttttcagtaagaacagatttgtcaattataataataataaattagcatttgtttagacttttgaaacgtaataacttcgtacaggatttgttataatgacatattatttctacagggtacttactctgtagttacagtccattgagccattatttaagatagagtatcataacccagaaaaagtattacaaaactttaaaagcttttattttttaccatctgaaaaattaattcatagcccaagcttacattcaacattttgtttgttttaagcctgtctgctttttctatataggaataatacatatacatatatacgtgtgtgtgtatacatatatacataatacatatacatatacatatacatatacatatacatatacatatacatatacatatacatatacatatacatatacatatacatatacatccagttttggattgcatactgactttagtgagtaagatgggtctgtcacttgtggggttgaagacagggaaatgtggtcattggcttgacgacacccatggcgatgttgaattgcagatgctcgcagtggaaggagccgtgccagtggctcatatgaagaacaagatgtggccaatggaatcaaccagaatgtggccctggccatagcagggaatcattttaatttgaagaccagcggagcaatgctgtcttccttggtatgtctgtacgcttcttgagtgtatatcttgttggtgtcacctcctcccgacttctgatagaacccagcttggaacagacctgcttctgcctcaacaccgtgatacaggaatccgtgaagctgatggctgagaagcactctgatcagatagctaccggaacagcaagagaggcccgtgacagggttagccagtcccggtgtgccaagcttagaaaactatcaaagacggaaaccattgtagagaagatcaaaccaaggcatccatccttgtactgaatgtaggctgggctttctctgtgtgtttattagtattgctgtttgcctcccataaatgatgaaggggccagaagcttccaaaacaaaagttagccttcctaggtccacagggtgtctaaggagatttgtcctctgacagagggggtcttagtggaaggtacccactgctgcactccgaggtgggaatcgcctgtttgccgatgttctttgtctcttgtcaaagcaatagttcgtcttctagctcggcgttgttattggttcgttcttgattgactcgaggagctttatctcacactcctaggacggcccagggttgcatctacgaggcagtcaattttcttgtgcatttcaatatttctgaatctgcagcaaacttgcttggtttacttctgagaaggcggggtcttgacccattagtctttactagctgactttttctgtcatctgtctagcacgtagcagcctcttccccttttatcctccccccgggagggttgggaagcagggaaatgggacacatgagacgtgtggccacactaatcttaacagtgccttagatcacactctaccttgaataatccaccttaccaaggtggatcacactgctcagggcagtatgggccttttctattaattgcctgtaaggagtacagaagccagagttcactgagtagagcgtgttccctgtgacgttctagcagaagactcactcttcatagcgtcatacccagaataactggagtgagagcaagtttgtcatccatcacttccatccaagactaagattttcctcacacagctgacaaattcctcattgcgatgtcacggccacagtccaccgggtgctgggtgcaccacatgaaacaaggggtcggctgcacacagctgtctgtctcagtgttatgagttatagcaagtgtgcttaggagcactctctagtgaaggttcaccacggctgttacagtgcatggcctgaggacccacccagactcaagtgaatcttaaggtaggtcccattgcagatggctttgcaaacatataggctagacccatgtgccaaccagttcgtgatcttgatgtgagactgaactgtgcattgttgggttattcgtggtgcctggtcaggctagctctcttctgtaagtgcaatcctccgccggccatcttgaaggagaagtccttggagatcttagcagcaagaaagcccctttgtatcactgatactaaagagcaccatcaaggtccagggcagaccaccagacagtgctcggttcagtggttcgtagcttaacccaaactctgccaagtgcgtctctactgagcagccccgcaccaagctcacattctctagccttgggctactgaaggcagatctcagccatgtgctataagtaggcccagaggttctcatctcttacacttgtaagttttcctgttgcctgacttctccccaccccccttcgcctccttccagccctataagcagtacaacatgctgaacgcggacactacccgccacctcatggtctgctttctgtggatcatgaaaaacgcggatcagagcctcatcaggaagtggatcgccgacctgccttccatgcagctcaacaggattctagacctgctgttcatctgtgtctcctgctttgaatacaaggcaagtgcagggtgtcttagctgtctcaatcctgtcttcttactcctccctctagacagcggcatcatcctttatccttcatacactgtattataacccgcagccggttcgcatctgtagatgtgaccgtctcgcatggaaagaatgtctgcctattgcagtgggcccattcctgccaataaagctttacccataggagccccagaaaagcatctacggagtatgtggctgaactccccaccatgacccccgatgtgttctcctttgacatatctctccctcaacagagatcccactaaaccaagtgtgtttctacctctgtccttccagggaaagcagagttctgacaaagtcagtaaccaggtcctgcagaagtcaagagatgtcaaggccaagttggaagaagccctgctccgtggggaaggagcccggggggagatgatgcgacgtcggattccaggtgcgcggatagtccacccactgccacacagctcttcacccttggacgccactctcactgacagcaggttctgggaccctgcgcttgtccctcaccaactctgagggaaagagtcaccctgaaagtgtccccaaatgctgtgttttaactgaggtttaacagcaagtaagaaagtgatttgtggatttgggaaaaagagctatctcccttgtttcaaagcccctctaggggacatgaagctctgcggcaacacgaatcatatccctgagtcattcaaaatgctactgcataaagcagtctcccaagaagagtgccagtgtaccatcatcctagggcccccctgacccaaacccctgcactcatcactttaatatgattaatattcccaataaaacggtgacaggtgggcgtggactctggggggtactcagcactttcacctgactccctgtccttccatccagcaagtcagggaacctcatgggagcccctgcccaggagaactgtggaagacagactgtcttccagagcggcctccagttcatccagggcaagccaccacagacataggctctgtcccctcagagcagcagtctctgatggacaggagactgtgctgatgcttttcagctaaactgaggactggacttttggttatcttagagggtttcatgctaatcgaattcctgccatgtgtctcttaactcccaggcactgaccggtttccaggcctaaatgagaatctgaggtggaggaaggagcagacacagtggcggcaagctaacgagaagctggacaagtgagtcgctctgcactgccttccccaacagtcctaactcttgttctcaggctgcttgtgttacgagacaactgcatccttccacagacagctaagaaaaggaaacatagtgtctgtgtaaaaacagctccagctacccaggatgcccagagatataagaagctgtggcttcagctcttaacaatgtatccatcgtttaaaggagcctcgtttccactgctccagttgatgaaagcaattggtgaggagcagagaaatagagaaagcaggacctggtgtccagccttgcgactctgcatctgggaatgagtgcaaaggtggatgttcagagatatttacagtggccctgcattttattgttcaaaaaaatcaagatacttgattttggaatattattttgttggatttggagtacatagcaaagcactaggttgttacaatgttatggaatcattaagggaacaggacaaatgcttggcttagagtatactctttcatctctaattacacacagtagccgtatttgtaaaaagccacaaagaaatttaccaaaacattaataatggtctttggttataaaaatgtaagtggctgatattttcttttattttaattgcatattttaggtttttacatttcaaatattatcctctttcttggtttccccctctcccattcctcctaccccagcttctatgaggatgctccccctcccacccacccactgccacctcagtacccttgtattcccctacactggggaattaagctttcacaggaccaagggcttctcctcccattgatgccagacaatgccatcctctgctacatatgcagctggagccatgggtcccttcatgtgtactctttacttgatggtttagtccctaggagctctgtggagtctggttggttgatattgttgttcttcctgtggggttgcaaaccccttcagctccttgagtcctttcgctagctcctccattggggtccacaggctcagtccaatagttagctgcaaccatgctcatctgtatccgtaaggctctggcagagcctctcaagagatatccatgatactttctttttcacacttctcgtgtttcctacattggatttgcatttatctattacaatcagaaaaaaaattgtaaaaaaaagagtgaaaaataatcttgcttggattctaacatataccgtgtgtgtgtgtgtgtgtgtgtgtgtgtgtgtgtgtgtatgtgtgtgtgtgcgtgtgtgtgtgtgatcttagtttgctttcaactgctctgataaaaacattatgaccaaaagcaacttaaggatgccaggctttatttcatcgtgacttacagttcattacagaatgaaccaggggcaggaacctggaggcagaaactaaggcagcaggcgtgaagaaacactgcttattgccctgctctccgtgacctgctagcctgttttcttatagctcagaaccgcctgcccaggagtggcaacccccacactaggctgggccccccacagcagtcattaatcagaaacaggactcgacttgccttaggcaaggtgacagaggcagttcctcagttctgagattccctcttcccagataactccatggcatgtcaagctgacagaagccagccagcacatgggtgtacgtgtatggtgcatcaaaggagggagggagggagaaccgtatataataatttagacgtatgagcgataaagtgaaatgtgtgaggatggataatgtatgtctttgcctctaagctgtaggtggccttatgaatcccagattcactgagcaaaacactgaatgattcaagacccctcatatacaccaaagcataaattgtacagctccattgtgtacgaagtgctcaccaaggagagggatgagaagacttgaataacagtgttttagtaaagaagtggtaatgtcttccccattactgtagactatcacatcctagtcaatctatttgggagtggtagcgatcaaaattactataaaagatcacatgttttcctagtaacagtttaataattattttgaaaagcatgccaaataatccggtagcctacggcttcaatgaaggatgctccttgtgctaatcggcgtctctggtaccaactacgtggcgagggcttttccaggaagcaggaatgtgctcttctgtggcttggaagggagaccgccacagctggttggcccaaagatacatggagaatcacatggttcgctcagatgtcacgtgggaaccccggttgttggtcttcttaataatgcccctttgcttagaagactggctcactctgatctccctagctgctgtttaagagctttgattctcagtcagtacgtttttgtacctggtttcagggaggaaatatggatttgaagttacattgccaggcactgggctctgctttctcctttcctctcttcttgcctgacgttctcatttagtatgggaggtgactgggaaaaacggtgcgcaacgccaaatggtgtatacaaggaggcccagcactgcttatatggttaggtcatctgctgcacaagattgagacaggagtgtggcaaggcgtgtttggccgggctgtgtgaattctcttaggaagcctttcccatttgctgacgtcagcagtcttcactgccagttctcagctccggatcctgttgggccacttattaacagagtgactgatgacccctccgtcctcagccaggtggcaattaaaacccctcacgttagagctacttggaaatgttataatttctagatgacagcttctgtcattttcttttaggtttattttaattttaattagttggactgtttcttttagagcagtcgttttctaacctggaccacacattcaaactgcccgtgggaacttccaaagtccgtgtctgcattgctccccctccccactccccagggcttctgcacgtagacaaggctgtgttcgaactcacaaggtccacctgccactgcctcctgagccctgagattgaaggtggaccccaccacacccagcgacaaagtgcccaaaggtaccctctgccagtttgttcagaactttgagattagtcagacttgaaggtgattcaacgctgcagacaagtctgaggcacactggcggacctcccaggagcgatgacaatattgcatgacaatatgaattacctaatgctactgagctatacagttaaaatgactaaggtggtaagttttatgttacctgcattttatcaccattctaaaagcaggttatgtactgtccactgtggaaccattagccacatgcagttctgaagcctgaagtgtggccagttcacactgaaatataggataaataaagcctcgtgcaggacggcacatgtcaggattgattttcatatttgttacttattcaccatccttttggtgtattgggataaataaaatatagtaaaaattaatattagctgggagtgttggcacataccctttattctggtaccaaggaggcagaagcaggtagatccctgtgagtttcagactagcctgggctacatgatgagcctggagttccaggacagccacagtgagacctttctaaggaaaagaaaaagaaaaataatgcccttaatttcattttatcttttttttttggtatgtggctatcataatatgtaaaatgatacacatgacccctagtacattactaccagagagtgttgatcaaagtgtggttggttgattaggggggttgctgttgttttgatacaggatttcaattaggtagtcttggctagccccagaactcactatgtaaaccaggctggcctcaaactcatagagatccacctgcccatgcctgaccctgttgctgtaaatgaggggggaattaggactgaagaatctatcctaagggtgaaatcagtttaaaatacctttcttagcactcagtgttatagacacaatagtccctggaaaagggaaaggagaccagctatgtggggaaccccgctctaagacattggaactgatagcataataccccggcatctgtggtaacatcttagccacggaacatagtaggaaagtcagctttttcattacctctccttaaaactaaatttgaatggtaaaaaaaagctttcaataataccattttatctacaggcagcacactccagtgggtaatcaaagctgtgaatggttccaaagccttgtctacctttctatgaaatgtgtcagtcactctggtaactaaggcagcagctaagtaaataacatgcaggtagcgttaggccatgctcacactgggcaaagccaccgtccatcatctgacaggataaattgtgccgctcagagctgcccgcagtgtggagccaacacactgcttattctggaatctctttttccacttctcaccaaaccacttcagactctcgctaactatgggtaactgaacccttgaaggcaaagctgtgggagaggcgagcaccttctccctttctggcttcacttgctgtatgaggatggatggactaccacacagaatgcaccagctctttagaattaaacctaaaggggaaatgctctcttctcggtgacttctgtttcctaccaggtaacatctagtccagcaacctccagcagaatgtctattgtcccaccccatgggatatgagtcttacttccccctggagaaggaaggcattctcactcttagctaagcaaccgtctttctccttctccgggagactgtccctttccacagttctatcactgtttgccagtgttcaccaagtgcaagtcacttcctgtctctctagcatgttgcagctctcccctgcatcctgcaaccacccattcagatccagatagtgctcgtgcgaggctctgaggctttaagcaactatctgataggctcacctaattgttagcagaaaccaataattaacttctatacccattttgttatttttataattgtcatcattattaataaccacaggactatgaataacctggagacttcactttgccatcttcccaatcagacacgaatctcaggaaatacctgtagtccttggatacattgatgtggcggctttgtgtgaattcacggttgactgttgtaaagaatccgttgagacctggtgcattggttgtcatctctggcacctggccagaccacgctatgctgtaattggtgatgtcctttttttttgtttcttagaacaaaggcagagttagatcaagaagccttgatcagtggcaacctggctacagaggctaatttgatcatactggacatgcaggaaaacatcatccaggtgaggatgacacactccccatcgggccagctcatgggtgcgtttcatgggatcagaaaggggatccttcattcaaaattgagaaagacatgagcatggttccaggatgcattttttaaactaaagcgggaacgtttggaatttgcagcagagcctaccttgcagattccagagatgccaggcatcccctggcttttctgacttgctactcccttggaacgagtgagatgttttgaggagctgatccgaaaagttgacctggcccaagcacatgctagatttataaaggagacaggaggcttttcaccaagtgcctgcaagaacattggtagctagattttccctggtaggtcaataccaactgaataatggcactggctaagataggagttgctgataatgggggggggggagaatcggggtcccctctcggggtttttagtctccttaataaaagaacttaaggatggactaaagtagaaactgaaggacaattttattagcatcttaaagaaaaacctccaaagctgacaagctgtaaatcacgtgactgcttggagaaggagcataaaggagaaaaggaaggaaagctattctgtttaagctggcatggcagtcagacacatgacagatatgtagtcacatggcagggaagggagcccagaatgctggcaaacccccaaagtgttggggaaagtacgactagaaaagagagaatgattaaaaggagaagttacacctttctgaataacttaaaaaagcagacagatgttcaaagtttatagcattgactcagtaaaccactgtgctaggggtggggattctggggagaaaaagtacactatcccattaaaggattaattactctacccatgtccttagcacagcttaaggtgaagctggtaccctatgggtggtcccttagccaagtgatttaccatcacagctagaatgttaggccttcctacaaaccagagattatattctcttagccagaagttttctcttttaatgggtctttatttctactctaacttcatggtagcactgggtcaaaaacagtgctaagcttgacaaacggtgtctgttctggactcagattgctgaaggacaatcatgtgtcctgtgagtttgctctccctaccataggaaagtacaagtcagtcctcccttgcagtggttcctcatcctctggcttgaccaacagcctctggtggaaagtacttcggaataaaaatgcatttgcattgaacatgtgcatactttttagtttttctatcactgttccataaaaaaatacagaatatcaacagttgacaccatgtttcaatgttgtattccgtactgaaagtgagctagtgataatttaaaatacattgtgaattgtattaagagaattgtgggttacatgtgtaaatgctacccccattttatatgagggatttgagcatccaaggatttcaaagtatcttttgaaagtttcttaacttcagttccctaaacatttagcatcacactgatggtgtctttgcacaagttatttctcagaacaatgtgcctggtaccaagccccaaaacaacttgcagctttctaaggaagctgaactacagaaaatactttttattattattctcgtcagtcctttctgtggccaatctagaaatcatggctcccaccaagaagctcttgtacttggaactcgaagttgtttttgaaacactgacagaaaatcgtgcctacaaagaaaaaacactccaaaagccatgacccaggctggagggagatgaaccttagaacttggtttaatatcctaaattgggcgcaagtctcaagtcagttagtttcgaaaagagggtcattgggaaaagagggcttaggctctcgtgatggttaacgaatggtagatggtggctcaccgagcccttaccaccttcagctgagaaggtgcatcagtcctctaagataagcagcagcagcctctcctgcctccaaccttactcagtgatgctgttcttcccccccactcgcccacccccaggcaagctcctccctggactgtaaagacagcctgctgggaggtgtcctccgggtcctggtgaattctctgagctgtgatcagagcaccacctacctgactcactgttttgcaactctccgagccctcatcgccaaggtaaacatgggatgcttgttttcttacccttaattaagagtgtggttcttgtctagcgtcacagccctctgcaagtggatcagacatcatgcagggcatggaggaagagctttgtccccccaagaaagtagacacactgattctcaggaactcaccgtggggaagccaaactgtggcttcatccttgcagtatgggcataactatagacatttcagatgacgactcactgaaagccagtaacacgagagcaagtcaagggagcaacttcagcttctccccctttcattcataccttctacagtgagattcagtgctgtgcctgatccccactaattactgtgacaaaatgaacatagtaagatactgggagatgcctcacaactgtggcattagtagtccattacgattattgtcctcctttgtgggaaatcttagtgggtgggggccttctacaataggatcttgtaaatttatgaatttggaattctgttataataattttctctttcttagtcaccaataatttccaaggaacccttgaaacacaagtaagcccttcaaggcttgtgacacccttaagcagtgaattcaacctggctaacaatgaagttaatggcacagaccttacctcagctgtgtgactcacaggcggacaccaccgcttaccttcctgtctgacactcttacctcattctgtttatggggcaccgcgttaacccttcaggctcttcgctcgtacagacagacatttgcaagtcccggcagccagccggagagcctgtgacagtgcccagtggtgcctaatggccacctgtgtctcttccagtttggagacctgctgttcgaggaggaaatggagcagtgtgctgacctgtgtcagcgggtgctccatcactgcagcagtagcatggatgtcacccggagccaagcctgcgccaccctctatctactcatgcggttcagcttcggagccaccagtgtaagcacggacccgctgggcggccagaaccaggagaggacaccattgcaaagcatggtggaggggagccctacggtgtagcctttagttatgccctgtgaggaagaccccaggagtccgcagatgaacaatatgagagggcggggtaggagggtgtggggctgcccagcagtcagagttccctcatgtgggacaaacacaggggtggctaaggattcacaaaagcatgtcctgtactaaagtcggaatagggtatagctctggatgataccaggatggtgtgtgggtgagaacggcaaaagattgctgtcatctggacctgaaaaaaaaaatcggggttgggtgagaaatcgtctcactatgtagctctggctgtcttggattcactgtattaaccaggctggccttgaactcagagatctgcctgcctctgcctcccaagtgctgcgtttaaaggcgtgcaccaccatgcctggcttggacctggcttttaagtaatacgtagacattttgtgtgttcagtttcatagcaaacctgcgtcttggtttgtgcatatttaaggatgcatgcttggtattttacttgctgtcatgttagtaaaacatctttttaaaaatgttttatagtccaaaagtggcggtgcacacctttaatcccagcactcaggaggcagaggcaggcagatctctgagtttgaggccagcctgtcctacagagtaagttccaggacagccagggctacacagagaaaccctgtctcagaaaccagagacagggggtgggggtggggatattttattttaaattctgtaaaagatctctaaccttagaaaagaatttatagatggaacaggaggcagataaatgggctcagagaagaaatggagactccttagggttttggtttgctttgtcctattttgtctattttgtgttaattctggaaactgaactgcagaccccacaatgctaaatgtttactttactactgagctgtatccctggccccagccctcatgatttgttagggagaactctttaaaaacctgtagggcatgctgcatgggcccttaagtacctgtgattttccatagccctgggagaaaagaagacatggaaaggtactatttacttcaaatccaaaatctcaaaagtgttgcctttgtggatctctgtgagttcaaggccagcctggtctacagagcaagttccaggacagccagagttacacagtgaaaccctgtttcaaagaacaaacaaaaatgctgcctcagaaggttccaagagactcttgacacaaagcatatatcctgtgaccaactttagaacaaatccgccagccttgcagtgtggcagtggcccaaacgcaatgaaaatttaaaaggcccctgacagatttatgggagcataggatccatccaacccattccaacagtaatgtgaatcttgtgtgaagtgtagctcacagtctgttgagagaaaaggaaatgcttaggacgggaatgaaagaaaccccgggagccgtttgtgtctggccccgcagcctcccgttagctatctgctgactctcttgttcgctccgtctcttctgatgcagaactttgcaagagtaaagatgcaggtaaccatggcactggcatccttggtaggcaaagcaccagacttcaatgaggagcacctgagaaagtccttaaggaccattctggcctattcagaagaggacacggccatgcgggcaactctttttcccacgcaggtagaccaatgagcgtaactttgtcttgtgtctgagttcgagattaccatttacaagcatatacgtttatggttttgcatataaggttttgcacataaaattatgtgaaatggatacatgtgatttgcagacattcctaacctgtcctgcagttgcatgatcccagtgatcgagaaatgcaacatgcagagcactgtcctcaactgcaagatgccaagagtctactaagggcgtagtcccagaccataagagcaaaacaaggaaagggacacctgagtatgtggtaacaaatactatgtaggatttaagaaaggagatacagaggaacaagggttagatgccattcagtggtagaacctagaatacacaaaaccctgggattgaccgacatcactccaaaaaggtaggtatgtaggtatgtacatacatacatacatgcatacatacatacatacatacatacatacatacatacatgattgatgaatagatagatggatagatagatagacagatagatagatagaagatggagacagacagacacatggacagacagacacacagatggatagatagtaaggggtgactaatgaagaaacagtggtctggcaatgtgggagtagagaggagtgaagttcctagagtagaatgtaggggagagggagtaaggagcatggatgtaatggtttgtgtgtaagacagaccagaaagctcccacttaggaagagcttgcagataagaattagtcctaaagaaactgggaggacagtctcttctgtctctccgcagagcccacatgacaggtgtccatgcaacggatgcagcctgcctgcctttaactccagcccctagcctaccctgtagtgggttctcacgccctgatattccagagtggtttacacctttgcagtcgacaaacgatcaagtctgtctgcactttctctgcaggtggaggagcttctctgcaatctcaacagcattttatacgacacagtgaagatgagggaattccaggaggaccctgagatgctcatggacctcatgtacaggtaaaggttcctgagcagagaagggcgttgttcttgtgcatggtggtacgcaccttcaatcccagcacccgggaggaagaggtgggatctctgagttcaaggccagtctggtctacagagtgagttccaggacagccaatgctccacagagaaaccgccaaaccaaaccaaaacaaaacaaaatgaaaagacattaattgtgatatttgtgagtctggatatttgtctcagtgaggtttcaccttttttctttttttgttaattttttattttttttaaatggatgatttgtcagcatgtatgtctgtgtaccacgtgtccctggaggccagaagagggcatcaaatccctctagggctagagtcatagacagtgtggagccagcgtgtgggtgctgggaatcaacccaggtcctgcagagcagtcagtgatcctgaccactgagccatctgtccagccccagtggagccctgtctggtgtcactatcatagctaagataggtagggcagtttgggagtaacatccgaaaatatacgaacactaatggaaaactggagttggctcattccaaatttccagaaaggtttccttaaccaagtgcaatgtttgaatattttaaaaacattttaaatattctgtctagtatgagagaaaagagttattgtctgttatatgagttatttcccacaggctgaactaaagttgtatccatgaacagagaagtctaagttttactttagaagtcactgtgctttaaaccctttctcctctggtccagtagtttggggagaaatcacttacacaggtaaaaatcctcagatccatcaaagggaaacagtactttgtcccccataataactctgagacaaaaggaaggagattacttgagatccatgaaaatggacatcattttaacagacttttttctcctcagaagatttgtgctaatgattccttcttgatatccagcacactctcggcacctagagtcgtacgaaatgtttaccttttctctctctctctctctcttttaattgtaaacaaaaatattatgggggataataaaacgtacaaggagagaagaacaagaaagttgaggtgccttccctgtaagaggggtgccactgaagggttgaacatgaaactttcccaatctgtcttcagaattgccaagagctaccaggcatcccctgacctgcggctgacctggctccagaacatggcagagaaacacactaagaggaagtgcttcacagaggccgccatgtgcctggtgcatgcagcagccttggtggcagagtacctgagcatgctggaggaccacagttacctgcctgtgggcagcgtcagctttcaggtgggacagacaggggccgcctttagatcagcatccaagcaggggctgggtgctttcacccgagggagtgcgtccgtccacagtcaccacaggtgtttctggatgtgacgaaggaaaaagcctaggatgtttccaccattcaaatatctggtcctagttgtctgtgttgccgtcgttgaaaagccctgtgtcaaagtgttatcatcatcgccttgtctaatggcttcgccgtcttttaaaacatattcattacagtaaatggtacttagaggtaacgggagctttgggagatattcgcagacattttagacattcggccatccccataagcctgtgaagcaggtagataaggaggttagtgttacttctgtttcactgatgtaagaaataagacagcactttttaaagatcattttaaactctttatagaacagttgtatttggcttatatactggcaaggagggcacggtggtataatgattccctcacaaaccaatccctcaggtccgttccccgactttgtgagattccactcttgtccaaaactaggaaagaatcaaattgacctgagatgggaaagaaatagctcaatggatgctttctgagaataacctgaaatttacctacagccaacaagggcaaattgtgtcagacctaaaaactcctccagggctgcccattatgaccttggactgttgttaccgtgtttttgttttttaatttttttttatttttttgttactgtgtgttttaatgcactacttaaagggcaggaaagccccaacaataagtgttatgagtaggttttctgtagagatgaccgtccctgcagcttacaggatagtcatggccatctccagccagtcgtgggaagctagagacaagcgttttacagtgttcttgtttgaacttccgtggacgaatgtatgaagggctttgttctcattactgttcttcaacacaattcgtgatgctttctttgtaacggagaaagaaaagacaactctaagtagctttctcaggcttcgagaaaaagacaccgaaactatcgctggtgcttagcttctggtttctcaaggcctgttcatctttcgggctgagccttatctgttcattcctgcctcccctcttgcagtaacaagaacacttgctctttgatttcattctccacagataaattttagtctcgattcggaatgtttgctataaaacccagttaaattcccattcagaagcacgaaagaattccatctgattctgagtcaagggaatgagaaagtttaaagaaatgccgtaagcggtttgttctgcccacttgcctgttaccatgctgctgtagcgctgccctccagctcccgcaggacacctacacttgtcccttgacatcgaactgtcccccttttctcagctcctctaccgagctatttcttctagctctcttacgccttttcctaaacgctgtactttgttacttcctacctaatgcttaaaaattaaccaaatttcatttttacttttatgtttaataagtcttactttatctgtgcggtacttagagtttggttgagttgccaaggtgggatagaattccagaacccctggggaagtctatcttacccttatgcggagtatacagatccatcttcttatataccttttttttaattaatcattttattcgtttacattttcaaatgacatcaaattatatcaaatgatataacttcccagttatacctccacaactcccctaccccatctcccttcgcccctttgcctctatgagggtgctcttccaaccactcacccactcctgcctcacccctttagcatctccccacgctgggccatcaaacctccacaggaccaaaggccacccctcccatgaatgccaaataaggccatgctctgctacatatgcagctggagccatggctcctccctccatgtgtactctttggttggtggtttagtctttgggagctctggggggtccagttagttgatgttgttcttcatatgggattgcaatcgtcttcagctcctccagtccttcccctagctcctccattttggtaccccggcttagtctgatggttggctgtgagtatctgcatctgtattggtcaggtgctggtagaacccctcagggaacagccataccaggctcctgttggcaagtgcttcttggtgtcagcaatggtgtcagggcttggtgtccgcatctgagccttcttatcttcagatgcccctgtaacatgcgcagagaggacgcttaacatccaccgccatgttctctcagctgcctccccctcgttcctctctttatatatctttatccattcctttttcttttttttttttttttggtttttttgtttttgtttcttttggcttttgtttgttttgttttgtagtattgtcgttatttgaaacagggtcttgcgataccaccctggctagcctggtactcgccacgttgaacagcagccttaaactcacagagatctgcctgccctgtgtcactcaagttccgggattaaaggccaccatggctggctatccattccttcttttacagactattcattgaacatttatcccgtccacacggactttatattctagcaagagtcaatttggaaatgggtgctggaaagtgagtgataccaagcccacattaacctaaggagacatggaattcatcagcctgtgcggggaaactagccctcagtacttgccaatccagacctaaaatccgaactcatccaccttcggtggtgtgggcatcattcttcataggcagaatttcctcactgaagatgctagattgagattcaagaaaagataaatcccttctttctagagttgcaaaaaatgtctcagggcatcttattggttctgaccaggtcatgtgtttatccctgaaccaatcataacggtcaaagtagtaagatggtgtgttatctatcccatagtcacaggtcacattgagaaaattaagatactttatgtcacaaaagaataaaggaattcagagagtattagcaacaggtatcctctattgactactttctctctttccttccccctttcttccttccctcctttcttccttccttcctttcttccttccttcttccctccctcactccctctttttctttgacaggatctcactgctcttgaactcagagagatccatctgcctctgcctcacaagtgctgggattttaggcttttactaccatgcctgcctctacagccaatttcttaaacatcctgctttagtttttaatcttgctgtactccgataagattaagcctttgggaaagacttgtaaagcagagataatgttcaggagaaataacttggaaggcagtgaggtccaagccactgagatcatcggaattctaaccctggagtacaagcaacactgacctcacaagcacagatatgatagttacgtttacaccctcactctgaagccaggagtgtctgcccagaatctttcccccatgacttacagctcctgagctgcccagcacatgctgttcctctaggagtaggaaagtctcatacagttccagtagtgctagggtcctaagccattagattccttcaggtgaatttcttgtcccctctgccatcagttcatcataatgattcacattttgaagaaagattggtcacagaggactttgaaaaactctgtgttcataaaactgtattccaatgtaactgtgagggaacaggctatggcaactgcctccttatgggcagttcttcataaagaagatcccgtgaccttgttcaccaaatcagaaggtggacagcctatatttcacaaagtgcatctgagcaattgctgagggagttctgaagtataacccaacttccaggggacagagcgttaccgttgtgagccatgcctgctacgtgctaggcagtaggaaggcgtggcctgtgctctctgcagttcctacacagtggacgtttcccaatcttctctataccatactcacctcttccattgttggaagccaagagtggctctcggcctatcagggcctgtaatgttcctgcctggatcagagcttggatgaggcacgtggagtgtgtgcagcataaaatgcaaagtgaaactcgctgtcagagtccagcaggtccctagtcagcagtcccaggaccctgaacatgaatactgcctgaaggctgtgccctgggtttcctgtttgagccaaccctgcccaagatatgacattccctgttaagaggctctcatgtctgtagttcacaggaagggaaaccacagagacgaaaggtgagtgagtgcagcttctgaactacgtaacagcatccataaagacattctcgtccattacttccctatgtaacattgcacttctgtagctcaaggtcaggatggcaggagcagcgtcagcaaaacaggaatccgttttctactcaccggccttgcccttctaatccaggactccctgtgttttcgagggttatctcgctaacagtaaagctgtttcagctaaactgctgttacactaagggaagtgtcctttctagaatgttgcttcgtggttaaaaattgtggagtttgatgacaagtttgcttacctcttccatctctggaagccaagagtggctctcggcctatcagggggattaatgtcccttccgggataagcgcttgatgaggcatgaggggtgtgtgcaacacaaaatgcaaagagaaactcgctgtcagaggcaagcaggtctcaagtcagcagttccaggaggctgaacatgagcgcctttcaaaatgagtggccaccagaagttcacatcgttggaatcacagactcgtagtaatcatggtccggtgaaggtggtagagcttagcttctttatctgtctgggtttcctggtgccctgtttgtcaagtcttgtgctccctgggctcatagtgggttctcttgcagaatatttcttccaatgtgcttgaggaatctgcagtctccgatgacaccttgtcacctgatgaggacggtgtatgctctggtcgctacttcactgagagtggcctggtgggcctcctggagcaggctgcagagctcttcagcacggtcagtgtctacagggctcattcaaccctgcatcgcactcagaggagcatgcagggcagggctgggcctagatgggtgttcccagattggcccagcggagcgttcgatgtccacaattgcatcagctctccaagtggggaagagaacgcctttcgctgtggacatacttaattccacagcatacgcattagccaggagtagtttcagtgttgtttctgtttaatggagcagaaagtaagccacagagagcatcagagatgaggcataatctcagaaaaaataggggaggagcccctgagaatctataatgtcttctacacctgacactcaacaggtcttcaaaaccgtgcatagcagggcagctcagagagctgtaaacagcagaagccacagagccatcccttagcccgatctgggtctcctagtaagagaaaaagcacagagctacagttcaggtcatggtagcaagccacttgtagttttccattttaactgttgcccctgcccccacagtgaaaccacgtaagtgtaatactttatttacctggtcagtcagtctgttttcctccctgtgattttcattctctcctcttcacctccagactccctccccatactgctaacgtttgcattcactgcctttatttccctatcttttttcctagaaaacttttccagaaaagactttttaacttaatttttagttaaaaaactagctttcttattacattttcccataggcatattattgtatttttttccatatatatacacactcatacacatatacccttattttcctgaaatcctagaaaatcaattggttagaaccatattagctcccttgaggccctgagtctggctagaggaaaacctctgataaactcaaaagccacaggcacatctctccaagcccctcgaggcctgggccatctcctccagttttcagtttgtgaaacgcttcctccctagttagtattgccatatggggtagcaatgttccttgaccataaagatagcaatgtgcctggtttgacccgaagacgtccagacaggcctggattccataaagcactgtgatgctcttgtatgtgttatttgcataattaactcgtcccttgtcttaaacttccagtgcattaaatgatctcctctttcccagggaggcttgtacgagacagttaatgaggtctacaagctggtcattcccatcctggaagcacatagagatttccggaagctgacctctactcacgacaagctgcagaaggcctttgacaacatcatcaacaaggtagctggggatgggcctggtccgtgggttctgtgagccggtgtcacgtgaccctgccctagtgctgcaccaccatctccctggctatagatttcccctgagctcatcttcactgcaactttccatgagaggaggaagggccggcaatccagtgtggcaagtcggattgctttatagctaggaaatgtaagaagattgagttaaacaaaggccccagaagcctctcattggatgtcttttgtcatcagttctggggtttattacgtaaatattaagtctgcttaacaaaggggatcttcttaatgagagtaaatgagagtaaattgtttgcagcccaataaccagtccttttagcccagtgggtcaccggtaacaacacagctaagaacgcttctctttactcctgtgacaggaccataagaggatgtttggaacttacttccgagttggtttctacggatccaaatttggggatttggatgagcaggaatttgtgtacaaggaacctgcaattacaaagctccccgagatctcacatagactagaggtgagaaaatgagactgtgcttgaccttgtacattccggaataaggcaatatgtcactttcaaaatacgttcatggctggcctctaaattttctaccttacatttgtagcacgggggagtgggcaagattgtgaataccatacacatttggacatttttctcttgaattctgtgtgtgtttcagagtttaaagtttaaatcttgaagtgattttccaagactgtataaaattcagtcagcatccatcgttatagcccccttccatgcatgaccactgtgtaccacgcacaggcactgggcatgttgcttgaaggttctcatctcaatttggaagccatccgacaaaactgcagaatcattccctccaccttcagcggtgagaccgtccttaagttgtcccctaatagcacactcctctcagatacaaagcggctggaaagtagcgatggctagccccagctaaaacctggcagctacactgtgaaacagaaaacagtagtgagttctgaaaggacagagcaaaagaaatagcataaagaaaggctgagaaaactgaagcagaaactgagaggagcaagcgtaagagccctctcgggcagagaccggggtcctgtgaagagctgacatctaaccaccgactcctccctacttatgctcctatgccacactttgactgtgtcccctcttatgactggaaagcttaaaaagtgtcgctcaattgtctcttgtactattcaaccccgccaagaggacaagactcaactctgagaagccgtggcctagtcaggttgggtagcttgtccaaagtcatttacttcacaacaaggaaaactagccatcggcccagactcttaactccctaatattgtgtcctctgcttaggattagaaatatgtttcttgtctccttgcacactgtggcttgtgacattatgggaagtctggcccctccaaattttcagggtacaaaatacaaaatgtaaatcatgccttacccatggagcttcttccaaaagtctgatgatgttggctgaatttgagagcacgcatctgtactgtagggaacacctagtattcgagtgtgctgaacgtccttagacttttatttctggttcaggaagtgcttaagtttgctttttagctcagagggaccatcaataatcagcaaatcttgccttgtgcttgttccaaagaattgcaagctttcaaaatgagttttacataccctgggcctcttttccctagggattttatggccagtgttttggtgccgagtttgtggaagtgataaaggactctactcccgtggataaaaccaagttggatcctaacaaggtatggagaaaattgactaaaagcagtcatcagactctaccctgaaagaagaaaatgacattttgggtctggactacctcagtccttcaaatgtaaccatgttcagtttggttttttttttttttttttgaggggtgcacacacacatgtataagtagagtgtatgaaggcccaccttcctatatatgaccacatgtgcaagctaaagtttagcacctggtgtctttatcatgaaccactttctttttaatacctggggttccctgtttggccagtaaacagtggggtcaaccgtccccaccaccccagcactggagatacacatgtgcaaggcggtggcttttctgtgggtaccagggagctgaacgagggttctcattttacccacttctcctttttagaattttttgacaggttctggctatgtaactcagtctggccacaccccagctctgtgtttatataaagcatttctcatcatccccctacagcccttaggactaggtttggttgtttccattttataagataagaaagctgaggcttggaaaggtcggaccactttccaagatgacattaatggcagagccacgactctcacaagaggtctgattccacccacattcttcttaattactgtggctcattagaacatttctgtaaactgtttaaactttctacttaaagcaagctttaaaattccaacctctgggcctggagagatggttcagcagttaagagcacttcctgctctcgcaaaggacccaagtttggttccctgcacccacatcagtctatcagtctgtaactccagctgcatggcatcagtcccctgcagaaatgcatgcacacttatggcaaatacaaactgtgtgtggacctgtgtgtgtgtgtgtgtgtgtgtgtgtgtgtgtgtgtgtgcgtgcatgtgtgcgtgcgtgtatgtaagtaaatacagcggcttctggctggccatacttagtggctccattctttaaactgcaggcattccttctagagatgttcaggatggctgtggtaagggaggcaacaccagggccataggcttcattgttcccggttccacaccaaggttccatcccatgctgagatgatagtgctgtgcatttctgatgctgacagctcatatgtagcacgtgacttcacaagttcaagactgcccttgtttcaaacatgagcctcagctgaggcccccacaccacccgtgcttctagctgactacaaatttaggaattcttacgacacccttgggttagattaactctcccggataagctcaaggactgacaacagaaccacagttctgattacagttgtacaataatggattcacagagtacaaggtcagaaggaaggcctctccatgtgggtccctgagttctgccttccagaattgcagaaagatgatctgatagggagggattggccaaatgcatgtttttcgacatttgtccaaacgctctcttgagagagcctgagctggggcctgagagcagtcaagataagcactggacagaaatgtttggagtccttggaggataaggctggctgtgtgcccaagtgcccttcccagcgtcagggcctttcccctcttttagaattcccagggcaggttgtgagtttagaaagagaatcctaacccaaaatcacacccagatttcattattctaaagcgtgatttacactgtgaggtcagtgagccacccttcctcctctctgggaggtgtcccaccctgaaacgttgatcatttccattcctttccttgtgtttttaaagaactcttctttattaacaagcacccaccccctcccccacctccctctctcccttcccccgcctccctcccccctctctctcctgtgtgtgtgtatgtggtgtgtgtgtgtgtgtgtgtatgtgtaattcactgatgtgtcatttggatacatatacatagccagtaccttgacagtcaaggtacaaaaccaccctgttcctctgaaaggtttgcccagcctctttgccaccactccctaattccttcagtggtcaccaagctgagcgatggaccccgatctgtgtagacttgtctgtctggaggtgcccatgtggcacatgcagccctttgaagctgacttctattcagcctagcccatccgtgactcaccaagttgaaatgcttcttccttttcatgctaagtgtcattcgctgtgttgatatgccacactttgcttagtatctctactagagggacacttgggcgctttctagttgtttattgtggacaatgttgctctagatcagtggttctcaaccgtcctaacgctgtgaccctttaatacagtttatgtcgtgacgaccccaaccataaaattacttcacaactgtaattttgcttttgttatgaactgtgatgtgaatatctgatgtgcactaatatgccacccacccctgtaaaagggtagttccacacggggtcatgaacagcacctctcaagcatggccttgttgagaccgattattaccttcattcctgttgtgttttgtgaatttcctgagaaatacatttctgttcacctcatatagtgagggcaacaacagatcaaagaaagggttctcttcaagtctaacttggtaaatcgatgaatttattggtgttatttacagagcatgggtactcataatacactgtactactgtgaaaccctctatgtgatttacgggcagctactccaccaaagaagcccctcccctcagcaagggtttgcagcttaatctttggggaagagtggaaaacagcagaggaggggcagacatcatcagtgcggagagcgccacagtagcctaccctcttccttcatacatcaagagagcaataagcacacccaagctagggagaaccccacacgagtactgcgtacacgagtgggagtggggttcttgtgtgggcggcatttgactgcatgaggagccttggcttacagagcagccatgctgcactctgcattcctggtgctcattcgaacattccagccgctccattctggcaaacacttgctgttgtacatttcctcagtctaagcatttgcactacctagggagcaggccctcattatggatgactttgccatgctagagagggggcaggtgaacccatctcttcctttaagcatgttcccttccacaacctcagggtcctttctttgcctgaggtggagaggagaaagggcaggttctgaattccagcctgaggtgtttggcattggtggttttccagattggaaaggaatgttgggctctgtcccagcatgcatctctttggctgaatggctcgtctcttcctgtctcctcacctcttcccccaggcctacatagagatcacttttgtggagccttactttgatgagtatgagatgaaagacagggtgacctacttcgagaagaatttcaaccttcggaggttcatgtacaccacccccttcaccctggaggggaggccccggggagagctgcacgagcagcatcgcaggaacacggtgctcaccaccatgcatgccttcccctacatcaagaccaggatccgagtcagccagaaagaggaggtaatgcaccccgagggaagtggccacctctgggaaaggggggcctggatgatctcccagacccacacaccagctctacctcgtgagactgaagggaaccctaaaggaagggaagagaagggctgggctcagtggcactgaggaatcaggggcaggtggatggctgtgcattcaaggccagccttatctgcataacaagttccaaggcaaccaggacgacatggtaagactcaacaaacatgtgccagccctgggactactatgatcccagtagtccagagcctgaggcaggagcatcttgagttggagagcatcctgggttgcatagcaagtctaaggcacccagatcttgtctgaataaaccagggctggagaggtagctcaacggtaggacatttgtctggcttgggcaaagatatccttgaaatattgcctcaaggctattcgttcactctcgtggggccaaggaatctcattcagttaattatacctttgaaaacagtattaaatatttagctctttaaagttatttatgtagcatatttacatatttagtgtatccattttaattataagcttatatgtctatatagtcccttcatattcttatgttttatatccataactatgaattggcatattgaaggaaaattttacatatatacagaatttgaatttttacccttgaaaaaatgagaactttgcatacatgtaagctctcccgagcagataggaaggaacccgttgcccggcgtggtgtcacacacctttaatcccagcatttgagaggcagaggcaggtagatctcttgagttcaaatctccatggtctacagagttctaggacagccaagggctacacagagaaaccctgtctatagcagagatcgtctgcagtctttgcagcccattggatgtgaagagtttactgctaccctatagagtgtgtcccactgctgtgatcaaatgcctggtgggaccaacttaggagcagattcactgtaactcagtcttcaaggtctcgtccactccggtgaagaaggaatggcagagctgttccatgcaaccatagcaaccaggaggcagacaacaaggcttccaggaagggacaaggaaaactacagccccaagggtttatgctcccataaacctataccacccagctaggtcccacagtctacactccgtgagagactcatccactggttatgttacaggtttctgttggaaaccaagaccccagttcatggatctgtgggtatatttcatattcaaacatctgtgcatccacagatttcaatacggatggagagaacaatttccagaaccatctttccagggagacgtgaatgcctgtatttaaattttgtcttttatgcaatgtttttctccagtattaggtactggattcagagcttcatgcttaccaaaatattgcacactatgccccattcttctgtaaaaaaaaaaaaaaaaaaacaaaaaaacaaaaaaccagaaaatatagacctaaaggcctgtaggtgtctcaggcattgttatattgtgaattgctggagagggaatcacaaacaagcagccccatgtagtgctctatatgggaagagcacagttgcagcctgtacagcaacctgctcctggccccagattcttccagtggctgtgcacgaggcacttggctccaacctcttagtaaaaatgttggcaagaaaggccttaggtactttggaaggctttaacccattttaatagagtctatcaagaagatctctcaagcctcagaattatgcatcgcaccatccttccattttctcctcaaaattcttatgtgtcaacttagaaaccacctctttatcctggactgcagccttctctgattcctggcttgactcaccgcaactcagcattgtctgtcttgtataaaccacacccagttctcagtctgccctctgtgattcagaatgaggtcttaaaaatccttatgaactgacagtgtgagcggatggcttctggatcttgatgagcctagcccaacacttcttctccagttgtctcgtgcatacctaatgtgacaggaatttttatagcaactcactttcatgacgtcccacccaagcatccagcttgatcttcccagaagcagctctctttccacaccctgacttcatccgtttatatgttgttcatcaaaacaacaactgtaacaggcctaatcaagtcagtgagcatgtagaggacttgcaaccatccactccatgcggtaggagctgcatgggccgaactggctggagagcagccatctagactgccgttgagtgatgtagcttcctcagggaggaggagtcacaggggagaggagcctgccctggagactgtcgatagaaaggtgtggggaaggcatctagtgtgtggtgcttactgttttagacttttaaacactgaaatattctgggcacaatacagagaagcactgtctataaaagtgtccttctagctatgtgcaatgccctagtactactccccgtcttccatgctgtgtaactaagtggcccagactggatgacaggaaaaacagaagtgtattgtcttggcagttctaaaggccaggaagctctagttcagggaattggagggttgggtccttgtgaaggctgaaggagaatctgtcccagtcctgcctcctggcctcatcaaaggatgtcttctccttgtacctgttcatcttgtctgtgccgtacacactgtgccctcatttccgtctctcctaaagacaccaattatgtggactagatctgccctaattcaccctgcttaactacctatatataaggttaccctctgagatcctggaggtgagggctttaaatgtgaattggggtgggggagcaggatttgacattcaggaaggaccaaaccagaacttagcaccctcatcacagtgagctggaaagggcatagaagatgtgaatgaaagcttacatgatgatgggaaagaaaatcatagccgccatactttccccttgtaatctgagtaacttgttcaataatagggaaaaaaaacactttgaacataagacataattatgatcaaatttgtaccttagtaattaatatatcttgtgctacttacttaatcttataaattccccttttatggtaaagtgaaaaggacaggcaatggtttaaaggagaaactcatatacagactctggacataggtactgaagaaacgtgaagcccgtctctaggtaacctgttcagattattccaaagtaccctgaaagccatcccttagctgctgcttcaaatccaggtagcctccctatcagagctccaggtttgccagggactgggggaggccacgtcctcactacgctgttgccttctcttcagttcgtcttgactccgattgaagttgccattgaagacatgaagaagaagaccttgcagttagcggtggccactcaccaggagccccctgacgcgaagatgctccagatggtactgcaaggctctgtgggagccaccgtgaatcaggtaggtggggctcacggatggcagcttggctggggattgtgtttctgctcatgtggtccacgctcttcttaggagttgatgaggaaccagtccacgtgcagtcgtcctttaaaataattctagaaaggagtagactgtacttcaggaatactattttctcagagtctccaatttgggaccagatctggcaatataacccaggaccagagtcctatagcagagagctgacttgagtccaagataggtagagctctatgcagacctttggactaattctaagaatgtgtatatggatgaaaagagggcatctgtctccttggttaggtagcagatattcccaacatagcaagtgccttgccagcaggactgatctgggactgggttctcaggtcactttgacaagattactgttttcattcctgttataaccatcccgcccgagtggaatgttactcagaactagcctgtctctgatggagacatacaagcccagttagtactttctgtctagtgacccccttttgatgttgggtcttcatgctgccacaccaaaaactcagtagccattgttcttcccagctaacaccttctccatctgaggctcccctgcagaaattgtaagtctgttcaactcagggagatcagaggtagtaaacaggagaaatgtccaagattagaaaaacattagagggaggcttttgcttttgtgcgtccccatccaatgaagaaaacagaagccatttactctcacaaccataggccacagatggcctgtgaattctctggctcaaaccagggtttacataaagagattcctccactggggccaccagataagcaggtaagcttggacagggagaggtagcccctgctttagaggagccgctcacagcagtaggcttcgctgctgtcacgttaccctgtggcatgaagggaaagctgtagggttagcattggattgcgaagacgctctcataccagtctgtattctcctgaagctctggtcctcctcaggaatcaatttcctgagaaactcaagacctccctaggctttctgttttagcaaaacaggctacaaaattaaatgatcaaagtaaggagccctccccacattctctctctctcccaagtaatttaactttcattccaattccatatcgtgtttctctttctccatcagggcccactggaggtggcccaagtgttcttggctgaaattccggctgacccaaaactctaccggcatcacaacaagctgaggttatgcttcaaggagttcataatgcggtaagaagggaggtgggggacaccgaagcctgggcgcacacacacacacacacacacacacacacacacacacacacacgctgaaccttaaggtccagggccgtagagcaacagtgcttgtactatccctaagaaactaacactttttgtgcaggctgcttcatggctgccgtggcactgtcctcacagtcatgttgtaagacagatatcatcatcttcgctttacacacgaggcatgggaggtttggagatggggggcgggggtgagttcactgatggccacacagccagttggcagcagggctgagctgcagcagtcttctagctcttggccatccctgcttctgtctggtctggtagtcactgaaacactaagtcaaagctgtctgcatttgtagtgtgcagttctgcaaatcgtacagtgacttactataggagcctaaaactaggaaagggtctaaaagtggccttttgcaaagaagacgatgcattcccacacaagccagcgtcacctgtcctactgacttgtgcacagctgccattaagggtagctgtttcagcctagtcagaaaatggctccctgggcagggccttgtgagttttgcaacacagacagttacctcaagtctccagtggtcctgaaaggaaaaaaaaaaaatgatgagatagggtatgatgccacttcactcataagagagaaaatcgtcagaagcatctgtaccaattgcctttacacgcagaaccttggtgcaatgtccaagtacaggaatagtctggcatggtggacagagagaaaggaagcgccagttagtttgcccaattgagtgacgacccactagagggctgctggctggtgaagtttgagactgtgcctcatcataaactggagaaatgcccaactccgctgtgtgaggggaaacatttcttccttcagtgaagcacggatatctggaactgacttatacaatagatgacatctaggaatgctggtatatttggtttccttttttgatggcatgtttccttttcatagcatgaagggccctagccagtccctactgggcgtactctaggcctctggaaactacagtcagagcgcaagggcaggtgacatttctcttcctaagatgatcctttaattcgaagtctttaaaagtgctattctcagcgagttgaggcaagagacttgctgtgagtttggggtcagctctgatggacatagcgtgccccagaccagcctaggaagcataacaaaactctctagtagcaatgctctggagaaaccagatggcgcctatcaaattaaatcaaatcaaatgcagactggttcagcaagcatggagtaggacccaagactctggcttttgtttgtttgtttgtttgtttgtttgtttgctgccatttgcttgactcctgtttatacaaccccactcccaccccaagctccccaaaccttatctcttcaggctctcccttttgtcttcctcccttcaaaaagacaagtatgctcaaacagccgttctgaagcagctgtccatgcggcctgccgcccgatccagcatacatacactctgtaccactggaatggagaggtgacctcctaacgcagaaaggccatagatagaacaatgctgcctgctactaccacatctaagacacaaccacagttaacttccccctcttcactccagacaggtcagaaatggtagctcatcaaactgtacgtttaaagtgagtgtaaggacatgtaagctcccctcacagcagtggctgaagcttccctctcctccttgcttgctgcctccaatggggaagctgccactatttgagaacatggacaacagtgtcaagtgcttgcttccaggtgactcactggcagggtagccccctgctgggcctcctcctcagtgggttctgtcacctcagctcctcaggaggctggtggatataccagagctcaaaggagaccccagccagccttcccgtaaggattgctctgtgggcacagccccggccaagtctgtagttgcttctcctgccccagagagtggcttctgagtcagccgtagccgatcagactcagccggaaggtctggcaacctggcatgcagcggtcagcactgccagcctcttggtaccctcccaatggctgccaagtgaggacaaagtcttctctgccttttcccaagaggaaatgcctggaaggttcataaacgcaagcagacaaatgtcacgagtgtctcctccctcttctcccagacttactggaccgtcagaggcactgcaatggtttctggactttctctcccttaatgtgattgttctcattcctgcaaaggtctggggcttgggagatagctcagtggataagaacactgttgtgcacgcttgaggatttgagttcaaatccctgctacctacataaaaacccaaatgctgctgtgcataaatctttaaaaaaaaaaaaaccaaaacaacaacttatcaaagagcaacaaagaggagaggtgaggagaaaccgacaggttaaggtagacaccactggggaacaatgaaaaccgtaacgatgactgcacagagctgaaagccctgtgaccccagcggaggagtggggcagacacaggacaatggctggggtttgctggtcaccaacctagttcccaggtcagtaagagaccctgtctcaagaaaaatcctgatgtcttcctctggcttctctatgcatgtacctacatacacatgtgcatacacaccacacatacaatcacaattaacaaattataaacatgaagtgattccaggggctggaaaggtaggtccacagttaaatgtgtgtactgttctctttcaaggaacctgagtttggttcccggcacccacattaagtagctcacaattgtctgccactccatgcacttactttcttaggggacacaaccacccacacacagaacaatccctgcctaaaatgaggttatgagagaaatgacaagccaaacttacagattcaaaaaatgggcaaagtgctgagttagagagagagagagagacagagacagagagagagagagagagagagagagagacagagagagagagacagagagagagagagagagagagagagagagagagagagagagagagagacagaaagacagagagagacagagagagaaagagagacaccataagccaggtgtggcccttgcctttaatcctagcacttgggaggcagaggcaggcaaagccagctcagagagatccaacacctctgacctcatcaggcacttgcagtcatgtgtatacataagcaaacacacacacacacacacacacacacacgcacgcacgcacacacacacacataaaaataaatgatttttaaaagttaagtaaaataaaataaaaactgacttttagaaggattaagtgacttaaattttaatttttatatttgaattagagccagccatattccgtacacctttgcaggaacatgtggccactgccctggcagtacgtatgctggctcagagtcagacagcaaggtgtgaagttggtggtttttaagatggtttgggtcaaaaaggaacttactcagtgtgcatggaaacagatctggaggtttcaggggtgttaaatggcgtgaggcttctaggaatcaggttaacaatggatgacctctatgacattgggtctccattgacacactaaggatggctaagttaagcatgctaaaaagaaatctgagccagggtgtgcgtgcgcctctgcctctctctctctctctctctctctctctctctctctctctctctctctctctctctcctcaatgtttttaatctgtaagtttaggcttctcctttctctcacaagctcctcttaggcaggaattgctcctgctgtgccatataccccaacagattatgggggtgggggcaggtgagggactttcaggttccagatgcctcaggacttaaataacccagaatggttcttagtttaatgcattggagaggaggtatgtgtgtggtacaagcttcagatttcaatgttgcaaaacaactttctcattaaaggcctcgtgctcatagcaagtttgttttccacttctctgggcagcatttttctaagcccatttgcccaagtaagttaactttcttcaaggctctaagctgaatgctggaggttcaggtagaaccccacagttctgactcgggcttctaaggcaaggcctaaaagtctgcttcttgaaagctctgtgggggagctgataagccatcagggttgaaaacactctcagtggggctgcactaatagctcaccgggtatgtgcactggctgcacagatataaggacctgagttcagatcccagcactcctgtaacaagcacgaggtcccacaccttctggtaaccccagcaatgaggataaggggagactgaaaggttggtatctctaaggtctgctggactgccccggcagagatcgtaagccacaggctcaacaggagaccttgctcaaagggatagggcagatgtgacagagggagctaccccatgtcctcctctgacctgtgagtgctagcacaggcatatgcatatcatacatgttgacatgcaccgcacacataccacacacacacatactcacatatattagaggttgtggttccacaacttgacatcgtggtgaccaaaaacacttgccagcagtaaagatttatttggttcacagtttctggggtttcagtctatgatcaattgggtccattactttggcctgcaggaaggcaggacagtgtggttgggagcatgtttttgaggaggcttgttatgtcacagtggccaggatataaaagaaaagggatgatgaagctacagacaagatatacctccaaggtcatttcaaggactcactcccatcactgaggtgctaccagtgttttttcccagttgcccatcagactgtgaccctatccatggactagtctatggatgagttccagagccccgtgatgcagtcgtggtacacagtacccatcagtggatagccaatgcttgagcactgtgccttaaggaaacatttagacaagggcagaggtcctcaagaagcagacttactgatactgttctccaagccgctaaaatacaaacgctgaggacatgcaacttcttctctctccctcagatgcggtgaggccgtagagaagaacaggagactcattaccgcagagcagcgggagtaccagcaggaactcaagaagaactacaacaggctgaaggacagcctcaggcccatgattgagcggaaaatcccagagctctacaagcccatattcagggttgacagtcaaaagaggtaagaaggagccagtgtagcctctttctgggactcagagatcatggggccaccccaaatccagcttgctcagctgttcttggcagaaagcaggaagcccatgcggactgaggacctggagtcaggcctccagccagtctgtggtttgcattcagcctaaaccttcccctgacctctccaagccccttattattgaccttgggccagtgaatctccaagtccatccaatggtgtgtgtgtaagtgtgtaggggataggggctgaacaatatgaatgggtctcggatactcttttatgtactaagttcccaggaccaatagctttttggttcataattttctcccaactatctcttttaaaggctgatcaatcctcctctgttctctctcctttatttcagggactctttccacagatctagtttcaggaaatgtgaaacccagttgtcacagggcagctgaaaaaagccacctttgcctgtagtgactggggccccactacctggaaggactcactggtacgtccccagcagccacccaagactgactgtccagccagtgctctggaaacttgtatttattaaaatatttttcatactgctgtacaaacaaggcctaagctgtttctgccgagtggccggtcatggtcctcccatgaagtgatgtcttctgacctatatctgaattcctaaaataaactcaaaccgtggacggaagagtggaccactgtcctgcagcctactccaagtgagcttcactcatcccttcagtgagaagaaaagataaactccagagaagtgaaacgttttccaaatcatctgtgagaggaagtcctacaggaagcctggtctcatgctggctgggaatctgggaatagatggatcgatcactctacaagctgctttttgcccctcctgcattgctggactgagtgccatctagttatctctgcgttgttgcttctgttaagctgagtgagcccacctttatccaggggacagttgtacaggacagtacagatcacccggccacacggcgctgacagcgcattccccagagcggaagcagttctcccagaacgttttgctggtttcctatacgcttgctctcactgtctcctttctcttctctgggataaggtgatttatttttttttatttttttttataggtgatttttatacaagggtaatactctgccttcgctccagaacattcgtcctctgtgtgctacaaaatatatgcttttgattctttttacagtgtattttaggaaaaagaaaaacaaagctatggtttgagaattaaattatatattttttcatacaactcacgaccttaacgaatactaaagatggaatacagacggcaagcaagtgggaagctggcacccacctttagtcctagctctcggaggccagcctggtcgacagagcgagctccaggacagccagatggacacagtgagaccaagtctcataaataaataaataaataaataaataaataaataaataaatcaatcaatcaatcaatcaatcatctctgtgggactgctgtttgtgactctgacaactcaaagtgttgtgaagcttcagagcccctggtaggaatggccttagtcaagcagtgccctccggagtggcttctagtgcagcgtctagcccttctggtcagcatagagttgtcagttgtcagttctgaaatgctcacacacaccaccgagcatgggttaccttattctgaaggaagacattgaaaaaaaaaaaagtggtttgctggctgtacttacttgaactagcataaagacagaccttggctggcccttatctgaatataaattctaaacaaacggagctaggagagaggaactgtaaccattcctaggcatggcccaaataagctaccttctgaaaacaagaatcctgacagtccatgaaagcccttttgttttgggcaagctagaacagcaactctcactcttttaatgctgtgacgctttaatacagttccgcctgttgtggtgacccccagccatctgtggctactaagtagctatagtctcactactgttatgaattttaaacatcagatatgcaggatgtctgatatgtgacccccacacaggttgagaaccac

SEQ ID NO: 3 - protein, 715 aa, Rattus norvegicus
  Vwa2
  CHAIN (523)..(707): amino acids of exon 11
  SITE (681)..(681): R681W
MPPYLFLPAIYTLLFSRVSLSSSLQEVHVSRETTGKIAVASKLIWCSAAVDILFLLDGSHSIGKGSFERSKRFATALCDALDISPGRVRVGALQFGSTPHLEFPLDAFSTRQEVKEIIKKLVFKGGRTETGLALKHLLRGLPGGRNGSVPQILIIITDGKSQGHVALPAKQLKERGIVVFAVGVRFPRWDELLTLASEPKEQHVLLAEQVEDATNGLLSTLSSSLLCTTADPDCRVEAYPCERRTLETMRELASNALCWRGSRQADTVLAVPCPFYSWKRVFQTHPANCYRTICPGPCDSQPCQNGGTCIPEGVDRYHCLCPLAFGGEVNCAPKLSLECRIDVLFLLDSSAGTTPEGFRQAKAFVKRFVQAVLSEDSRARVGVASYSRDLMVAVPVGEYQHVPDLVRILDSIPFSGGPTLTGSALLQVTEHGFGSASRTGQDRPRRVVVLLTESHAQDEVAGPADHARARELLLLGMGNELMRAELERITGSRKHVIIHTDPRDMFSQIPELQRRLCSQPRPGCQAQSLDLVFLLDASASVGGENFAQMQSFIRKCTLRFDVNPDVTQVGLVVYGNQVQTAFGLDTHPTRASVLRAMSQAPYLGGVGSAGTALLHIEDKVMTVQRGARPGVPKAVVMLTGGSGAEDAAVPAQKLRDNGISVLVMSVGAVLKEAVRRLAGPWDYLIHVAAYTDLRYHQDTLIEWLCRGQAASQPLQ

SEQ ID NO: 4 - DNA, 21 bp, Artificial Sequence
  section of exon 44 of DOCK8 gene
  source (1)..(21): mol_type="unassigned DNA" note="section of exon 44 of DOCK8 gene" organism="Artificial Sequence"
gcctacatacagatcactttt

SEQ ID NO: 5 - DNA, 21 bp, Artificial Sequence
  section of exon 44 of DOCK8 gene
  source (1)..(21): /mol_type="unassigned DNA" /note="section of exon 44 of DOCK8 gene" /organism="Artificial Sequence"
gcctacatacagatcactttt

SEQ ID NO: 6 - DNA, 21 bp, Artificial Sequence
  section of exon 44 of DOCK8 gene
  source (1)..(21): /mol_type="unassigned DNA" /note="section of exon 44 of DOCK8 gene" /organism="Artificial Sequence"
gcctacatacagatcactttt

SEQ ID NO: 7 - DNA, 21 bp, Artificial Sequence
  section of exon 44 of DOCK8 gene
  source (1)..(21): /mol_type="unassigned DNA" /note="section of exon 44 of DOCK8 gene" /organism="Artificial Sequence"
  variation 10: /note="G replaces wild-type C"
gcctacatagagatcactttt

SEQ ID NO: 8 - protein, 2099 aa, Homo sapiens
  DOCK8 protein
MATLPSAERRAFALKINRYSSAEIRKQFTLPPNLGQYHRQSISTSGFPSLQLPQFYDPVEPVDFEGLLMTHLNSLDVQLAQELGDFTDDDLDVVFTPKECRTLQPSLPEEGVELDPHVRDCVQTYIREWLIVNRKNQGSPEICGFKKTGSRKDFHKTLPKQTFESETLECSEPAAQAGPRHLNVLCDVSGKGPVTACDFDLRSLQPDKRLENLLQQVSAEDFEKQNEEARRTNRQAELFALYPSVDEEDAVEIRPVPECPKEHLGNRILVKLLTLKFEIEIEPLFASIALYDVKERKKISENFHCDLNSDQFKGFLRAHTPSVAASSQARSAVFSVTYPSSDIYLVVKIEKVLQQGEIGDCAEPYTVIKESDGGKSKEKIEKLKLQAESFCQRLGKYRMPFAWAPISLSSFFNVSTLEREVTDVDSVVGRSSVGERRTLAQSRRLSERALSLEENGVGSNFKTSTLSVSSFFKQEGDRLSDEDLFKFLADYKRSSSLQRRVKSIPGLLRLEISTAPEIINCCLTPEMLPVKPFPENRTRPHKEILEFPTREVYVPHTVYRNLLYVYPQRLNFVNKLASARNITIKIQFMCGEDASNAMPVIFGKSSGPEFLQEVYTAVTYHNKSPDFYEEVKIKLPAKLTVNHHLLFTFYHISCQQKQGASVETLLGYSWLPILLNERLQTGSYCLPVALEKLPPNYSMHSAEKVPLQNPPIKWAEGHKGVFNIEVQAVSSVHTQDNHLEKFFTLCHSLESQVTFPIRVLDQKISEMALEHELKLSIICLNSSRLEPLVLFLHLVLDKLFQLSVQPMVIAGQTANFSQFAFESVVAIANSLHNSKDLSKDQHGRNCLLASYVHYVFRLPEVQRDVPKSGAPTALLDPRSYHTYGRTSAAAVSSKLLQARVMSSSNPDLAGTHSAADEEVKNIMSSKIADRNCSRMSYYCSGSSDAPSSPAAPRPASKKHFHEELALQMVVSTGMVRETVFKYAWFFFELLVKSMAQHVHNMDKRDSFRRTRFSDRFMDDITTIVNVVTSEIAALLVKPQKENEQAEKMNISLAFFLYDLLSLMDRGFVFNLIRHYCSQLSAKLSNLPTLISMRLEFLRILCSHEHYLNLNLFFMNADTAPTSPCPSISSQNSSSCSSFQDQKIASMFDLTSEYRQQHFLTGLLFTELAAALDAEGEGISKVQRKAVSAIHSLLSSHDLDPRCVKPEVKVKIAALYLPLVGIILDALPQLCDFTVADTRRYRTSGSDEEQEGAGAINQNVALAIAGNNFNLKTSGIVLSSLPYKQYNMLNADTTRNLMICFLWIMKNADQSLIRKWIADLPSTQLNRILDLLFICVLCFEYKGKQSSDKVSTQVLQKSRDVKARLEEALLRGEGARGEMMRRRAPGNDRFPGLNENLRWKKEQTHWRQANEKLDKTKAELDQEALISGNLATEAHLIILDMQENIIQASSALDCKDSLLGGVLRVLVNSLNCDQSTTYLTHCFATLRALIAKFGDLLFEEEVEQCFDLCHQVLHHCSSSMDVTRSQACATLYLLMRFSFGATSNFARVKMQVTMSLASLVGRAPDFNEEHLRRSLRTILAYSEEDTAMQMTPFPTQVEELLCNLNSILYDTVKMREFQEDPEMLMDLMYRIAKSYQASPDLRLTWLQNMAEKHTKKKCYTEAAMCLVHAAALVAEYLSMLEDHSYLPVGSVSFQNISSNVLEESVVSEDTLSPDEDGVCAGQYFTESGLVGLLEQAAELFSTGGLYETVNEVYKLVIPILEAHREFRKLTLTHSKLQRAFDSIVNKDHKRMFGTYFRVGFFGSKFGDLDEQEFVYKEPAITKLPEISHRLEAFYGQCFGAEFVEVIKDSTPVDKTKLDPNKAYIQITFVEPYFDEYEMKDRVTYFEKNFNLRRFMYTTPFTLEGRPRGELHEQYRRNTVLTTMHAFPYIKTRISVIQKEEFVLTPIEVAIEDMKKKTLQLAVAINQEPPDAKMLQMVLQGSVGATVNQGPLEVAQVFLAEIPADPKLYRHHNKLRLCFKEFIMRCGEAVEKNKRLITADQREYQQELKKNYNKLKENLRPMIERKIPELYKPIFRVESQKRDSFHRSSFRKCETQLSQGS

SEQ ID NO: 9 - protein, 1932 aa, Artificial Sequence
  consensus sequence of human DOCK8 and rat Dock8
MATLPSAERRAFALKINRYSSEIRKQFTLPPNLGQYHRSSTSGFPSLQLPQYPVEPVDFEGLMTHLNSLDLAQELGDTDDDLVFTPKECRTLQSLPEEGVELDPHVRDCVQTYIREWLIVNRKNQGSPECFKTGSRDFHKTLKQTFESETLECSEPAQGPRHNVLCDVSGKGPTCDFDLRSLQPDRLENLLQSAEDFEKEEARTNRAELFALYPSVDEEDAVEIRPVPECPKEHLGNRILVKLTLKFEIEIEPLFASIALYDVKERKKISENFHCDLNSDQFKGFLRAHTPSVSSQARSAVFSVTYPSSDIYLVVKIEKVLQQGEIDCAEPYIKESDGGKSKEKEKLKLQAESFCQRLGKYRMPFAWAPISLSFFNVSTLERETDGRSVGERRLQSRRSERLSEENGVGSNFKTTLFFKQEGDRLSDEDLFKFLADYKRSSSLQRRVKSIPGLRLEIAPNCCLTPEMLPVKPFPENRTRPHKEILEFPREVYVPHTVYRNLLYVYPQRLNFNKLASARNITIKIQFMCGEDSNAMPVIFGKSSGPEFLQEVYTATYHNKSPDFYEEVKIKLPAKLTVNHHLLFTFYHISCQQKQGASELLGYSWLPILLNERLQTGSYCLPVALEKLPPNYSHSAEKVPLQNPPIKWAEGHKGVFNIEVQAVSSVHTQDNHLEKFFTLCHSLESQVTFPIRVLDQKIELEHELKLSIICLNSSRLEPLVLFLHLVLDKLFQLSVQPMVIAGQTANFSQFAFESVVAIANSLHNSKDLKDQHGRNCLLASYVHYVFRLPERDPKSGPTADPRYHTYGRTSAAAVSSKLQARVMSSSNPDLAGTHAADEEVKNIMSSKIADRNCSRMSYYCSGSDPSAAPRPSKKHFHEELALQMVVSTGVRETVFKYAWFFFELLVKSMAQVHNDKRDSFRRTRFSDRFDDITTIVNVVTSEIAALLVKPQKEEQAEKNISLAFFLYDLLSMDRGFVFNLIHYCQLSAKLLPTLISMRLEFLRILCSHEHYLNLNLFMNDTAPSPCPSISSQNSSSCSSFQDQKIASMFDLTEYRQQHFLTGLLFTELAALDAEGGISVQRKAVSAIHSLLSSHDLDPRCKPEVKVKIAALYLPLVGIILDALPQLDFTARRSGSEEQAINQNVALAIAGNFNLKTSGLSSLPYKQYNMLNADTTRLMCFLWIMKNADQSLIRKWIADLPSQLNRILDLLFICVCFEYKGKQSSDKVSQVLQKSRDVKALEEALLRGEGARGEMMRRRPGDRFPGLNENLRWKEQTWRQANEKLDKTKAELDQEALISGNLATEALIILDMQENIIQASSLDCKDSLLGGVLRVLVNSLCDQSTTYLTHCFATLRALIAKFGDLLFEEEEQCDLCVLHHCSSSMDVTRSQACATLYLLMRFSFGATSNFARVKMQVTMLASLVGAPDFNEEHLRSLRTILAYSEEDTAMTFPTQVEELLCNLNSILYDTVKMREFQEDPEMLMDLMYRIAKSYQASPDLRLTWLQNMAEKHTKKCTEAAMCLVHAAALVAEYLSMLEDHSYLPVGSVSFQNISSNVLEESVSDTLSPDEDGVCGYFTESGLVGLLEQAAELFSTGGLYETVNEVYKLVIPILEAHRFRKLTTHKLQAFDINKDHKRMFGTYFRVGFGSKFGDLDEQEFVYKEPAITKLPEISHRLEFYGQCFGAEFVEVIKDSTPVDKTKLDPNKAYIQITFVEPYFDEYEMKDRVTYFEKNFNLRRFMYTTPFTLEGRPRGELHEQRRNTVLTTMHAFPYIKTRIVQKEEFVLTPIEVAIEDMKKKTLQLAVAQEPPDAKMLQMVLQGSVGATVNQGPLEVAQVFLAEIPADPKLYRHHNKLRLCFKEFIMRCGEAVEKNRLITAQREYQQELKKNYNLKLRPMIERKIPELYKPIFRVSQKRDSFHRSSFRKCETQLSQGS

SEQ ID NO: 10 - protein, 2099 aa, Rattus norvegicus
  Wild type Dock8
  CHAIN (1620)..(2070): DHR2 region
  CHAIN (1632)..(2070): DHR2 region
  CHAIN (1860)..(1867): SS4 region
  CHAIN (1861)..(1867): SS4 region
  CHAIN (1861)..(1939): amino acids corresponding to exon 44
MATLPSAERRAFALKINRYSSSEIRKQFTLPPNLGQYHRHSLSTSGFPSLQLPQLYEPVEPVDFEGLVMTHLNSLDAELAQELGDLTDDDLHVAFTPKECRTLQHSLPEEGVELDPHVRDCVQTYIREWLIVNRKNQGSPEFCSFRKTGSRRDFHKTLQKQTFESETLECSEPATQTGPRHRFNVLCDVSGKGPITSCDFDLRSLQPDERLENLLQLSAEDFEKEKEEARKTNRTAELFALYPSVDEEDAVEIRPVPECPKEHLGNRILVKVLTLKFEIEIEPLFASIALYDVKERKKISENFHCDLNSDQFKGFLRAHTPSVDPSSQARSAVFSVTYPSSDIYLVVKIEKVLQQGEIADCAEPYMIIKESDGGKSKEKVEKLKLQAESFCQRLGKYRMPFAWAPISLASFFNVSTLERESTDLEPGAGRNSVGERRSLSQSRRPSERTLSFEENGVGSNFKTTTLATNIFFKQEGDRLSDEDLFKFLADYKRSSSLQRRVKSIPGSLRLEIAPAPDVMNCCLTPEMLPVKPFPENRTRPHKEILEFPIREVYVPHTVYRNLLYVYPQRLNFANKLASARNITIKIQFMCGEDPSNAMPVIFGKSSGPEFLQEVYTAITYHNKSPDFYEEVKIKLPAKLTVNHHLLFTFYHISCQQKQGASGESLLGYSWLPILLNERLQTGSYCLPVALEKLPPNYSIHSAEKVPLQNPPIKWAEGHKGVFNIEVQAVSSVHTQDNHLEKFFTLCHSLESQVTFPIRVLDQKITENTLEHELKLSIICLNSSRLEPLVLFLHLVLDKLFQLSVQPMVIAGQTANFSQFAFESVVAIANSLHNSKDLRKDQHGRNCLLASYVHYVFRLPELHRDAPKSGGPTAVVPDPRYHTYGRTSAAAVSSKLMQARVMSSSNPDLAGTHCAADEEVKNIMSSKIADRNCSRMSYYCSGNSDVPGSTAAPRPVSKKHFHEELALQMVVSTGLVRETVFKYAWFFFELLVKSMAQYVHNLDKRDSFRRTRFSDRFKDDITTIVNVVTSEIAALLVKPQKESEQAEKINISLAFFLYDLLSIMDRGFVFNLIKHYCTQLSAKLNTLPTLISMRLEFLRILCSHEHYLNLNLLFMNPDTAPASPCPSISSQNSSSCSSFQDQKIASMFDLTPEYRQQHFLTGLLFTELAVALDAEGDGISRVQRKAVSAIHSLLSSHDLDPRCLKPEVKVKIAALYLPLVGIILDALPQLYDFTDARSGRSRASGSYEEQDVANGINQNVALAIAGNHFNLKTSGAMLSSLPYKQYNMLNADTTRHLMVCFLWIMKNADQSLIRKWIADLPSMQLNRILDLLFICVSCFEYKGKQSSDKVSNQVLQKSRDVKAKLEEALLRGEGARGEMMRRRIPGTDRFPGLNENLRWRKEQTQWRQANEKLDKTKAELDQEALISGNLATEANLIILDMQENIIQASSSLDCKDSLLGGVLRVLVNSLSCDQSTTYLTHCFATLRALIAKFGDLLFEEEMEQCADLCQRVLHHCSSSMDVTRSQACATLYLLMRFSFGATSNFARVKMQVTMALASLVGKAPDFNEEHLRKSLRTILAYSEEDTAMRATLFPTQVEELLCNLNSILYDTVKMREFQEDPEMLMDLMYRIAKSYQASPDLRLTWLQNMAEKHTKRKCFTEAAMCLVHAAALVAEYLSMLEDHSYLPVGSVSFQNISSNVLEESAVSDDTLSPDEDGVCSGRYFTESGLVGLLEQAAELFSTGGLYETVNEVYKLVIPILEAHRDFRKLTSTHDKLQKAFDNIINKDHKRMFGTYFRVGFYGSKFGDLDEQEFVYKEPAITKLPEISHRLEGFYGQCFGAEFVEVIKDSTPVDKTKLDPNKAYIQITFVEPYFDEYEMKDRVTYFEKNFNLRRFMYTTPFTLEGRPRGELHEQHRRNTVLTTMHAFPYIKTRIRVSQKEEFVLTPIEVAIEDMKKKTLQLAVATHQEPPDAKMLQMVLQGSVGATVNQGPLEVAQVFLAEIPADPKLYRHHNKLRLCFKEFIMRCGEAVEKNRRLITAEQREYQQELKKNYNRLKDSLRPMIERKIPELYKPIFRVDSQKRDSFHRSSFRKCETQLSQGS

SEQ ID NO: 11 - protein, 2100 aa, Mus musculus
  Dock8 wild-type
  CHAIN (1633)..(2071): DHR2 region
  CHAIN (1862)..(1940): amino acids of exon 44
  CHAIN (1862)..(1868): SS4 region
  SITE (1865)..(1865): wild-type Q
MATLPSAERRAFALKINRYSSSEIRKQFTLPPNLGQYHRHSLSTSGFPSLQLPQLYEPVEPVDFEGLVMTHLNSLDAELAQELGDLTDDDLHVAFTPKECRTLQHSLPEEGVELDPHVRDCVQTYIREWLIVNRKNQGSPEFCSFRKTGSRRDFHKTLQKQTFESETLECSEPATQQTGPRHRFNVLCDVSGKGPITSCDFDLRSLQPDERLENLLQLSAEDFEKEKEEARKTNRTAELFALYPSVDEEDAVEIRPVPECPKEHLGNRILVKVLTLKFEIEIEPLFASIALYDVKERKKISENFHCDLNSDQFKGFLRAHTPSVDPSSQARSAVFSVTYPSSDIYLVVKIEKVLQQGEIADCAEPYMIIKESDGGKSKEKVEKLKLQAESFCQRLGKYRMPFAWAPISLASFFNVSTLERESTDLEPGAGRNSVGERRSLSQSRRPSERTLSFEENGVGSNFKTTTLATNIFFKQEGDRLSDEDLFKFLADYKRSSSLQRRVKSIPGSLRLEIAPAPDVMNCCLTPEMLPVKPFPENRTRPHKEILEFPIREVYVPHTVYRNLLYVYPQRLNFANKLASARNITIKIQFMCGEDPSNAMPVIFGKSSGPEFLQEVYTAITYHNKSPDFYEEVKIKLPAKLTVNHHLLFTFYHISCQQKQGASGESLLGYSWLPILLNERLQTGSYCLPVALEKLPPNYSIHSAEKVPLQNPPIKWAEGHKGVFNIEVQAVSSVHTQDNHLEKFFTLCHSLESQVTFPIRVLDQKITENTLEHELKLSIICLNSSRLEPLVLFLHLVLDKLFQLSVQPMVIAGQTANFSQFAFESVVAIANSLHNSKDLRKDQHGRNCLLASYVHYVFRLPELHRDAPKSGGPTAVVPDPRYHTYGRTSAAAVSSKLMQARVMSSSNPDLAGTHCAADEEVKNIMSSKIADRNCSRMSYYCSGNSDVPGSTAAPRPVSKKHFHEELALQMVVSTGLVRETVFKYAWFFFELLVKSMAQYVHNLDKRDSFRRTRFSDRFKDDITTIVNVVTSEIAALLVKPQKESEQAEKINISLAFFLYDLLSIMDRGFVFNLIKHYCTQLSAKLNTLPTLISMRLEFLRILCSHEHYLNLNLLFMNPDTAPASPCPSISSQNSSSCSSFQDQKIASMFDLTPEYRQQHFLTGLLFTELAVALDAEGDGISRVQRKAVSAIHSLLSSHDLDPRCLKPEVKVKIAALYLPLVGIILDALPQLYDFTDARSGRSRASGSYEEQDVANGINQNVALAIAGNHFNLKTSGAMLSSLPYKQYNMLNADTTRHLMVCFLWIMKNADQSLIRKWIADLPSMQLNRILDLLFICVSCFEYKGKQSSDKVSNQVLQKSRDVKAKLEEALLRGEGARGEMMRRRIPGTDRFPGLNENLRWRKEQTQWRQANEKLDKTKAELDQEALISGNLATEANLIILDMQENIIQASSSLDCKDSLLGGVLRVLVNSLSCDQSTTYLTHCFATLRALIAKFGDLLFEEEMEQCADLCQRVLHHCSSSMDVTRSQACATLYLLMRFSFGATSNFARVKMQVTMALASLVGKAPDFNEEHLRKSLRTILAYSEEDTAMRATLFPTQVEELLCNLNSILYDTVKMREFQEDPEMLMDLMYRIAKSYQASPDLRLTWLQNMAEKHTKRKCFTEAAMCLVHAAALVAEYLSMLEDHSYLPVGSVSFQNISSNVLEESAVSDDTLSPDEDGVCSGRYFTESGLVGLLEQAAELFSTGGLYETVNEVYKLVIPILEAHRDFRKLTSTHDKLQKAFDNIINKDHKRMFGTYFRVGFYGSKFGDLDEQEFVYKEPAITKLPEISHRLEGFYGQCFGAEFVEVIKDSTPVDKTKLDPNKAYIQITFVEPYFDEYEMKDRVTYFEKNFNLRRFMYTTPFTLEGRPRGELHEQHRRNTVLTTMHAFPYIKTRIRVSQKEEFVLTPIEVAIEDMKKKTLQLAVATHQEPPDAKMLQMVLQGSVGATVNQGPLEVAQVFLAEIPADPKLYRHHNKLRLCFKEFIMRCGEAVEKNRRLITAEQREYQQELKKNYNRLKDSLRPMIERKIPELYKPIFRVDSQKRDSFHRSSFRKCETQLSQGS

SEQ ID NO: 12 - protein, 2100 aa, Mus musculus
  Dock8 Q1865E
  CHAIN (1633)..(2071): DHR2 region
  CHAIN (1862)..(1940): amino acids corresponding to exon 44
  CHAIN (1862)..(1868): SS4 region
  SITE (1865)..(1865): 1865E"
MATLPSAERRAFALKINRYSSSEIRKQFTLPPNLGQYHRHSISTSGFPSLQLPQLYEPVEPVDFEGLVMTHLNSLDAELAQELGDLTDDDLHVAFTPKECRTLQHSLPEEGVELDPHVRDCVQTYIREWLIVNRKNQGSSEFCSFKKTGSRRDFQKTLQKQTFESETLECSEPDTQTGPRHPLNVLCDVSGKGPLTSCDFDLRSLQPDERLENLLQLVSAEDFEKEKEEARKTNRPAELFALYPPVDEEDAVEIRPVPECPKEHLGNRILVKVLTLKFEIEIEPLFASIALYDVKERKKISENFHCDLNSDQFKGFLRAHTPSIDPSSQARSAVFSVTYPSSDIYLVVKIEKVLQQGEIADCAEPYMIIKESDGGKSKEKVEKLKLQAESFCQRLGKYRMPFAWAPISLASFFNISTLERESTDVEPGVGRNSVGEKRSLSQSRRPSERTLSLEENGVGSNFKATTLATNIFFKQEGDRLSDEDLFKFLADYKRSSSLQRRVKSIPGSLRLEISPAPDVMNCCLTPEMLPVKPFPENRTRPHKEILEFPIREVYVPHTVYRNLLYVYPQRLNFASKLASARNITIKIQFMCGEDPSNAMPVIFGKSSGPEFLQEVYTAITYHNKSPDFYEEVKIKLPAKLTVNHHLLFTFYHISCQQKQGASGESLLGYSWLPILLNERLQTGSYCLPVALEKLPPNYSIHSAEKVPLQNPPIKWAEGHKGVFNIEVQAVSSVHTQDNHLEKFFTLCHSLESQVSFPIRVLDQKITESTLEHELKLSIICLNSSRLEPLVLFLHLVLDKLFQLSVQPMVIAGQTANFSQFAFESVVAIANSLHNSKDLRKDQHGRNCLLASYVHYVFRLPELHRDTSKSGGPTTVVPDPRYHTYGRTSAAAVSSKLMQARVMSSSNPDLTGSHCAADEEVKNIMSSKIADRNCSRMSYYCSGNSDAPGSTAAPRPVSKKHFHEELALQMVVSTGVVRETVFKYAWFFFELLVKSMAQYVHNLDKRDSFRRTRFSDRFKDDITTIVNVVTSEIAALLVKPQKESEQAEKINISLAFFLYDLLSIMDRGFVFNLIKHYCSQLSAKLNILPTLISMRLEFLRILCSHEHYLNLNLLFMNTDTAPASPCPSISSQNSSSCSSFQDQKIASMFDLTPEYRQQHFLTGLLFTELAVALDAEGDGISRVQRKAVSAIHSLLCSHDLDPRCRKPEVKVKIAALYLPLVGIILDALPQLYDFTDARSGRSRASGSYEEQDVANGINQNVALAIAGNHFNLKTSGAMLSSLPYKQYNMLNADTTRHLMICFLWIMKNADQSLIRKWIADLPSMQLNRILDLLFICVSCFEYKGKQSSDKVSNQVLQKSRDVKAKLEEALLRGEGARGEMMRRRIPGTDRFPGINENLRWRKEQTQWRQANEKLDKTKAELDQEALISGNLATEANLIILDMQENIIQASSALDCKDSLLGGVLRVLVNSLSCDQSTTYLTHCFATLRALIAKFGDLLFEEEMEQCADLCQRVLHHCSSSMDVTRSQACATLYLLMRFSFGATSNFARVKMQVTMALASLVGKAPDFNEEHLRRSLRTILAYSEEDTAMQTTPFPMQVEELLCNLNSILYDTVKMREFQEDPEMLMDLMYRIAKSYQASPDLRLTWLQNMAEKHTKKKCFTEAAMCLVHAAALVAEYLSMLEDHSYLPVGSVSFQNISSNVLEESAVSDDTLSPDEDGVCSGRYFTESGLVGLLEQAAELFSTGGLYETVNEVYKLVIPILEAHRDFRKLTSTHDKLQKAFDNIINKDHKRMFGTYFRVGFYGSRFGDLDEQEFVYKEPAITKLPEISHRLEGFYGQCFGAEFVEVIKDSTPVDKTKLDPNKAYIEITFVEPYFDEYEMKDRVTYFEKNFNLRRFMYTTPFTLEGRPRGELHEQHRRNTVLTTMHAFPYIKTRIRVSQKEEFVLTPIEVAIEDMKKKTLQLAVATHQEPPDAKMLQMVLQGSVGATVNQGPLEVAQVFLAEIPADPKLYRHHNKLRLCFKEFIMRCGEAVEKNRRLITAEQREYQQELKKNYNKLRDSLRPMIERKIPELYKPIFRVDSQKRDSFHRSSFRKCETQLSQGS

SEQ ID NO: 13 - DNA, 24 bp, Artificial Sequence
  section of exon 11 of Vwa2 gene
  source (1)..(24): /mol_type="unassigned DNA" /note="section of exon 11 of Vwa2 gene" /organism="Artificial Sequence"
aggcttgctccacgggactacctg

SEQ ID NO: 14 - DNA, 24 bp, Artificial Sequence
  section of exon 11 of Vwa2 gene
  source (1)..(24): /mol_type="unassigned DNA" /note="section of exon 11 of Vwa2 gene" /organism="Artificial Sequence"
aggcttgctccatgggactacctg

SEQ ID NO: 15 - DNA, 24 bp, Artificial Sequence
  section of exon 11 of Vwa2 gene
  source (1)..(24): /mol_type="unassigned DNA" /note="section of exon 11 of Vwa2 gene" /organism="Artificial Sequence
aggcttgctccatgggactacctg

SEQ ID NO: 16 - DNA, 24 bp, Artificial Sequence
  section of exon 11 of Vwa2 gene
  source (1)..(24): /mol_type="unassigned DNA" /note="section of exon 11 of Vwa2 gene" /organism="Artificial Sequence"
aggcttgctccatgggactacctg

SEQ ID NO: 17 - protein, 183 aa, Artificial Sequence
  amino acids encoded by exon 11 of Vwa2 of rat
  SITE (159)..(159): wild-type =R
GCQAQSLDLVFLLDASASVGGENFAQMQSFIRKCTLRFDVNPDVTQVGLVVYGNQVQTAFGLDTHPTRASVLRAMSQAPYLGGVGSAGTALLHIEDKVMTVQRGARPGVPKAVVMLTGGSGAEDAAVPAQKLRDNGISVLVMSVGAVLKEAVRRLAGPRDYLIHVAAYTDLRYHQDTLIEWLC

SEQ ID NO: 18 - protein, 184 aa, Artificial Sequence
  amino acids encoded by exon 11 of Vwa2 of mouse
  SITE (159)..(159): wild-type =R
GCQAQSLDLVFLLDASASVGRENFAQMQSFIRKCTLRFDVNPDVTQVGLVVYGSRVQTAFGLDTHPTRAAVLRAMSQAPYLGGVGSAGTALLHIEDKVMTVQRGARPGVPKAVVMLTGGSGAEDAAVPAQKLRGNGISVLVMSVGAVLREAVRRLAGPRDSLIHVAAYTDLPYHQDMLIEWLCR

SEQ ID NO: 19 - protein, 183 aa, Artificial Sequence
  amino acids encoded by exon 11 of Vwa2 of human origin
  SITE (159)..(159): wild-type =R
GCRTQALDLVFMLDTSASVGPENFAQMQSFVRSCALQFEVNPDVTQVGLVVYGSQVQTAFGLDTKPTRAAMLRAISQAPYLGGVGSAGTALLHIYDKVMTVQRGARPGVPKAVVVLTGGRGAEDAAVPAQKLRNNGISVLVVGVGPVLSEGLRRLAGPRDSLIHVAAYADLRYHQDVLIEWLC

SEQ ID NO: 20 - protein, 715 aa, Rattus
  Vwa2
  CHAIN (522)..(706): amino acids encoded by exon 11
  SITE (681)..(681): wild-type = R
MPPYLFLPAIYTLLFSRVSLSSSLQEVHVSRETTGKIAVASKLIWCSAAVDILFLLDGSHSIGKGSFERSKRFATALCDALDISPGRVRVGALQFGSTPHLEFPLDAFSTRQEVKEIIKKLVFKGGRTETGLALKHLLRGLPGGRNGSVPQILIIITDGKSQGHVALPAKQLKERGIVVFAVGVRFPRWDELLTLASEPKEQHVLLAEQVEDATNGLLSTLSSSLLCTTADPDCRVEAYPCERRTLETMRELASNALCWRGSRQADTVLAVPCPFYSWKRVFQTHPANCYRTICPGPCDSQPCQNGGTCIPEGVDRYHCLCPLAFGGEVNCAPKLSLECRIDVLFLLDSSAGTTPEGFRQAKAFVKRFVQAVLSEDSRARVGVASYSRDLMVAVPVGEYQHVPDLVRILDSIPFSGGPTLTGSALLQVTEHGFGSASRTGQDRPRRVVVLLTESHAQDEVAGPADHARARELLLLGMGNELMRAELERITGSRKHVIIHTDPRDMFSQIPELQRRLCSQPRPGCQAQSLDLVFLLDASASVGGENFAQMQSFIRKCTLRFDVNPDVTQVGLVVYGNQVQTAFGLDTHPTRASVLRAMSQAPYLGGVGSAGTALLHIEDKVMTVQRGARPGVPKAVVMLTGGSGAEDAAVPAQKLRDNGISVLVMSVGAVLKEAVRRLAGPRDYLIHVAAYTDLRYHQDTLIEWLCRGQAASQPLQ

SEQ ID NO: 21 - protein, 791 aa, Mus musculus
  CHAIN (522)..(706): amino acids encoded by exon 11
  SITE (681)..(681): wild-type = R
MPPLLLLPAIYMLLFFRVSPTISLQEVHVNRETMGKIAVASKLMWCSAAVDILFLLDGSHSIGKGSFERSKRFAIAACDALDISPGRVRVGALQFGSTPHLEFPLDSFSTRQEVKESIKGIVFKGGRTETGLALKRLSRGFPGGRNGSVPQILIIVTDGKSQGPVALPAKQLRERGIVVFAVGVRFPRWDELLTLASEPKDRHVLLAEQVEDATNGLLSTLSSSALCTTADPDCRVEPHPCERRTLETVRELAGNALCWRGSRQADTVLALPCPFYSWKRVFQTHPANCYRTICPGPCDSQPCQNGGTCIPEGVDRYHCLCPLAFGGEVNCAPKLSLECRIDVLFLLDSSAGTTLGGFRRAKAFVKRFVQAVLREDSRARVGIASYGRNLMVAVPVGEYQHVPDLIRSLDSIPFSGGPTLTGSALLQVAEHGFGSASRTGQDRPRRVVVLLTESRSQDEVSGPAAHARARELLLLGVGSEILQAELVKITGSPKHVMVHTDPQDLFSQIPELQRRLCSQPRPGCQAQSLDLVFLLDASASVGRENFAQMQSFIRKCTLRFDVNPDVTQVGLVVYGSRVQTAFGLDTHPTRAAVLRAMSQAPYLGGVGSAGTALLHIEDKVMTVQRGARPGVPKAVVMLTGGSGAEDAAVPAQKLRGNGISVLVMSVGAVLREAVRRLAGPRDSLIHVAAYTDLPYHQDMLIEWLCREARLPVNLCKPSPCMNEGTCVLKNGSYRCECRGGWEGPHCENRILRGDAPMARSFHQEPAGLQGPTPSQQAPKHLRIGKALSSAK

SEQ ID NO: 22 - protein, 755 aa, Homo sapiens
  Vwa2
  CHAIN (523)..(707): amino acids encoded by exon 11
  SITE (682)..(682): wild-type = R
MPPFLLLEAVCVFLFSRVPPSLPLQEVHVSKETIGKISAASKMMWCSAAVDIMFLLDGSNSVGKGSFERSKHFAITVCDGLDISPERVRVGAFQFSSTPHLEFPLDSFSTQQEVKARIKRMVFKGGRTETELALKYLLHRGLPGGRNASVPQILIIVTDGKSQGDVALPSKQLKERGVTVFAVGVRFPRWEELHALASEPRGQHVLLAEQVEDATNGLFSTLSSSAICSSATPDCRVEAHPCEHRTLEMVREFAGNAPCWRGSRRTLAVLAAHCPFYSWKRVFLTHPATCYRTTCPGPCDSQPCQNGGTCVPEGLDGYQCLCPLAFGGEANCALKLSLECRVDLLFLLDSSAGTTLDGFLRAKVFVKRFVRAVLSEDSRARVGVATYSRELLVAVPVGEYQDVPDLVWSLDGIPFRGGPTLTGSALRQAAERGFGSATRTGQDRPRRVVVLLTESHSEDEVAGPARHARARELLLLGVGSEAVRAELEEITGSPKHVMVYSDPQDLFNQIPELQGKLCSRQRPGCRTQALDLVFMLDTSASVGPENFAQMQSFVRSCALQFEVNPDVTQVGLVVYGSQVQTAFGLDTKPTRAAMLRAISQAPYLGGVGSAGTALLHIYDKVMTVQRGARPGVPKAVVVLTGGRGAEDAAVPAQKLRNNGISVLVVGVGPVLSEGLRRLAGPRDSLIHVAAYADLRYHQDVLIEWLCGEAKQPVNLCKPSPCMNEGSCVLQNGSYRCKCRDGWEGPHCENRFLRRP

SEQ ID NO: 23 - DNA, 202904 bp, Mus musculus
  source (1)..(202904): /mol_type="unassigned DNA" /note="mutant Dock8 gene" /organism="Mus musculus"
  misc_feature (177307)..(200987): /note="DHR2 region"
  exon (188809)..(189045): /note="exon 44"
  variation (188818)..(188818): /note=" wild-type C"
gcggcgcggctgacagatgaggctggcgccgggcgcgccgggctctgcagcggctgtgcgttcgggtcccgtccccccgcagccccgcgagccccgaagccgtggaaccgcgcgcgcgcgccatggccacgctgccgagcgccgagcgccgcgccttcgcgctcaagatcaacaggtaagacggcgcggttcctggccagtccgcggcggggcgcgccggtccccgtggcgactcattctcgtcctcttgtcacccgcgctgctgtccggaccagcgtcttgcgccacctccccaacccggcgtggctcccgccgccctcgctgttctgagacaggtggcccgacccggagcgcggggtcgcgcgcccgaacttggcttaacaaattgcgccttccttccagtcgggagacagcggaaagaagctaagtggctgaaaatcagccctgctttgaagcagatcggtccgtggtccagggttagggctctttcaaccccctctttccaaaaaacatcttggctttggatggcagcgctatttttataccttggtccaaaaggagccaaccatgaagtggaaaaaatgattttaaaaaaattcctcctttaaataagcgaaagggaatgagctgtagctgacgtttaaagatttctagcactctagaaaagtgaagaacacagggatttccaatttataaacagagctgcacacgccacatctctgtgagttgactactcataaagttctcggtagactcaagcggcggcgtttcctccactgaaaactgctgacaagtattcaagggggcatttttgccttgacctgggaaatctagactgcctggctaaaagataatgtggaagggcagcgctctggaggacttccagggttggtgtttttttcttgttcttgtttgtttgtttttgcatgtgggacgctggcccacagtaattcatctttgggctgctagtgagtgaagctggagtcactaggaatcaccatccttgaatagtgagcggtaaggaccacagagggccagtggagtttccctgtgcagttgtgagcaagacctttcacttccttcactatttcatctgtccaattagtttaattattaatgtggactgtatacaaatgctaaagggtaactatatcataattcagtcttcctatcggagcctttcccctcatcaggctgtcctggctgcagtggggccgtaggggcataggaagttttgatggctgtcatcattgccttccccgcttctcctctctttgtccctgtcatgagaaagaaaaaaagccaggaaacaaggaacaagggcaggaagctgttagggattcaggaggggtgagactgatctgaagtgactgtctgggacctaatgcaagcctggagacgctcttgcaaggagcttcggggttggtataacccaagggtggaggattaaagtccttagccagaagtggtggacttacccatcatcccagccctcaggaggctgagacaagacaatcacaagctggatgccagtctaggctgcatacagagaccttgcaacaaggaaacaaaacagaagcaaccacccaagcaaaacagtgttaggaaaaccaagagccaggctacattcaaatttccttacaaagttttgctgcaaactaagtatatcccattgggcatacacattttatatttttctcatgtttggtctcctccctcctccccttctttctgtctctccaaggtctctcactttgtttcacaaactggccttgaactccgagcacttgacctgcttcaactttctgattgccagggttgcaactgtgtaccggcttttgtgtcagtgggaataactagtatccgaaccctagtttttccctcttctgactgttaggaggactgagtagagtagagacagcgtgcttatgatgcctggctcagaatgaatgttaaatagctgctagctgacacatcagtaccgctagcttcgtcgtggtcaatgccatctctaatatcatcaaatctgagatgatacttcagaacctacgaagacaaagtaccaagggcagctgaagttggactatttttccaggcagaggccatttggggcagggtatggggatgccagtggccacctgcagctttcttggggttatatctctcacatgtgcaacacagtgctgagaaccctaaactggagccaaatgttccaagaagtacccatttaggaaagaaaagtatgctttctaatcttctggaaagagtctacattgtatttttctttttaaaaagagttttgttctcccccctgtaagccactttgtgtattgggagcaagagttacactgaggtcttggctggtataactttcagaagagtggatttctgagaatgtatttggtgtggctataacattcaaacccgccacttgcaggctgaatactgacttgcagatgttgttgcagatgttgtgctcagtcgtcctggacagatgtggtcagctttcattgtccacttgacacaatccagagtcacctgggaagagagtcagaaatgatgggttgtcggcatcgggtttgcctgtggacatgtctctgttagattctcttcattgttgtttgatggagggaagacatagcccctgtgggcagtgccatttcacaagcttgatcctaagctgcagaagagtgaggaaagtggacttgagcaagccagggtgtgtggggcttctttagcgcttggctgtggatacgattagctgcttgaatccctgttttgacttccccaaaatgatgcactgtgatatgaaattgtaaaccaaataaaccctttcctccgctaagctggagatgtttttaccctggcgagagaaatgaaacttgaaagaaggggaaagtgaagcgtggggtgtacttgcacaaggctgtgtaatttgtaaagatcacagtccgcgatagcagccaggactacagatggcccttacattggccctctgcattaggcctgtactattttgatctacgtgttttaagaatttcctttaaaagcaaagagttaactttaaaaaaatcatttctgtaaacagcattgacagctctgcttctgagcagtacctgctaggtcagcaaggtgctgttcagcagagtcaaacatggaaaaaaaacctttttttacctacatgagtgtctattggtttttaaaataaatccgattccaaaagtaacaccgtgtggaaaggtggccatcaggactcttagtacactttcacattttcacctttctatttaacaatgatattccttaagacacttgttctttctattaatgaaatattgtaatgtgacatattaaaaatgaacagttgcaaagagctcagctctgggccctacagaggaatgagcagtgtcttacatacagtctgtgaaaaatgttccccactgcatgcaaatttctgtggcttcttgcaagcagcattgcccagtgcagggccagcgccaaagccagaggaagtcgtcaatgctggcagcagctgtctcgccatggttgatctgactctctggtgctctcagaaccttatattcccatgctgggtatcatcagggaggacatgctaggagcagctagtgtgactgtaactctagttgggtattttgaaacatttctctagaaccagtaactcagggagatagaagacaagactctagcgccgaattgttctgacttggaatgtctggtaggctaagatgcattgctcttgactttagtttttccctgattgtcacgagcaagaaagactagatctgaactaggtagtcacaacaatggttgtgtttgggatttttaggaactgctgttatcagatgtatcctagttctttaaggaacattcccctgttaatgaacgacctctttgatgactggaatatgctgcttttgtagatgcaggaaattattactaatgctgtgaagattcatcagacaagaccttcatattctttttcctcttatgcagtgttggttattaaagctagggccatctgcacgctaggcaaatgttttaccactgagccatatctcagcccacttgcttctgtcaaacccagaataagtatagaacttgatcaaacatgaaagtaaaacaagaactctagataaataaaggaaaatcataaactgttgtaagccctggacacctaggattgaaagaagtagattgtaagacttacacttttatattccttactgtattagttaacttttctgtggccgtgacaagatctcatgacccaaagcaacttacatacaggagaaagaatttagtttggcttatggttccagagggagagttgataaagggggagggggaggcaacgcaacaagctgtcagagcagaaagccaagaggtcacatcttcaactgcaaactgcaaacagaaacagcagtctggaaatgggccaaggctgtaagctttcaagttttccccaagtgacaagcctcctatagctagcttacactacctccctaacaggggaatcaagtgttcaaacacttaagcttgtgggaagcatttctcattcaaactaccacacttactatgcggcagatgcgaatctaaatgtttatatcgccattcatccacttctatgaattaggaacaattactgccttcatttataagtggggaaacagaacacaggcaagttattcacgttttgatatcacacagctaattaaggccagagccgggattgatattcaggcagtctgtctccagaatcctgccctcctactcactataccatgatgtgtcttggttttcctttaaaacaaagaagtaacaatatttactatctactaagtactgtgccagacagccaagattccggcactagtgagggaggggctctccggtccccaccccttaatgaggagctagcggcagctgatagctgctggagcagggagaatcattctttcttgaggttgtttcccatacaccagtgggtgaccccacacccatgtacatgtgggtggcgctaattggatttagtgcaattaaaaaaagaaacgcatgggattggagggggaacgtgttgaggggatatgaggagagtgggaggagggaaatgaatggctgtgatcatagtttattgtacgaatatataaaattctcacaaagaaaattattataataacgaaatgagaacagttgaaaatgcttattattgatttgattcgtgcacattgtacatatattgaaataccacactgtactcaataaatatgtagttattatttgttaataattaaactaaaacagttaaaaattataattttctaaaaagagaaagacatgccagtcaaatggcttagctggtaaaagaacttgtctgacaacataggaactgtctctcgatggagagagagaactgatttcccaatgtcatcctctgacctttacacatttgtcatagacacgcacccatgttcatacacacacacacgcacacgcacacactcacacacacactcacacacactcacacacacacacacacacatgatatcatacaattaaaaatgtttaaagtagaacaaagcataaagtattctactcatcattgggatgatttttatacaagataaaaccagatgctaagaaagaataaagttacataaaggtttcattcaaggataaccccaaggtaccaaaacctgtaattcaagctctttgggaggctgaggcaggagaatcacaagaccaaatttagcctctgcaacttggactctgtctcaaaataacatgtaaaaagagggctggacacatggttctttgacagagcacctgttcagcatgtaccaagcccagttctgagagagaggtgggggtggggggagacagagacagacagagacaaacagaggagggatggggagatggctcagtggtaaagggtcttgctgttcatttgatgcccagaaccacatggaggtggaaggagatttggggattacagttaattaagttgaatgaatctcagaagagaccttgaactttggacttttaacattgttgtgactgctatagactatgaggactttgaaagttggactaaatgcattttgtattatgctatgtttaagtatggcccccatagactcatgtttttgaacaagtctatggggaccagggagtggaatgtgatggtttgtatatccttggaccagggagtggcaccatttgaaggtgtgaccttgttggaataggtgtgacctggttggaatgggtgtgtcactgtgggtgtgggtataagatcctcaccctagttgcctggaagtcagtcttccactagaagcctttggatgaaggcatagtactctcagctcctcctgcaccatgtctgcctggatactgccatgctcccaccttgatgataatggattgaacctctgaacctgtaagccaaccccaattaaatgttgttttttataagacttgccttggtcatggtgtctgttcacagcagtaaaaccctaactaagagagaggtggaaggaaagaactgactccataaatttgtcctctggtatcatgcctgcacccctcccccacacatacatatacacaataataatattcaataaaacaaagtttaaagaaaagcaataactcaggactggagattactcagtggttaagagccagtaccttcttgcagaggacccttcacatgcttttgtgaatggagggaatggaggttttatgtccctgttggctcatggagaggatactcagcatcatgtggctccccagggagaggggcagagctcagagacaaggtctcctatctcagctctccacatagagctagagaacggatgggatgatgtcacaaaccatctggttttcatcttctttaacaggggcatgaaaagtcaggtcaccctactggtcctcttgctggagaactcttttttttttttgaactcagaaatctacctgcctctgcctcccaagtgctgggattaaaggcgtgcactaccacgcccggctggagaactcttaagaagcagggccacttgagtcttttcaatagcaaacagccagttactcaataatatctcaggcaattttattaaaggttaaagcaagagacatatactattcctggtcccataagcatccaggcttatatatagcccaggttggccttgaactcatgatgatctttatgtttcatccacccatgtgcttggattagcatacatgactactacagccagcttccaggtctccattctttcagtagcatgcacatgggacccaagtgcaactcaatgaagtaacagcttggggagttgaaaggagaacagaaattacaagcagaggggaagacactgtgtgggcatttgcacgagctctgcatgcagatcagtggagaactttggggagtcagtcctcattgtctgccttactaatgtggggtctcttgtttctgctggagtgtactctaggctagctggttcatgagcttctgctgtctctacctcccatctcaccacatgaagactgctgggattacagatgtgcaactctgcatctggctttttccttgggttgcaggcattttgctgcacatggccgatcaggcttgtgcgagcaagtgcttttatctgctgagcgtctccctgactcacattcccttgtaaaatttcaaaaactaaatcaaaaagtacagtagcaaaatctagtaaacaaaaagaaaaaaaaaactgctcacatttcaaccactcataaactagtaataacctgttaacatttggatacacccccttctagtttttacaaaaacaaaatcgtcttgtgtgtgctacattgtaatctttaaaatgtgtcaacaactcgccagtcaatgtaggtctatattataaatactgtatatgtattataatttatgaaagtagttattattggacattaagataattcccaggtaacttccagttttgcagaccacgtcgagcttgagggaacagtctgaagcttggtttctgtctagtagcagaattacttgtttaaaaaaaaattaaggtttttttttctagtttgttttcttcttggtgtgaatgtatgcatgtgtgtacagtgttgagtctgtgtgtgcacccatctcttcatgcagaagccagaaggacatttggtatgctctcagttttttggttttggttaggctctgtctagacctgggcttaccggagcatgtaatcactccaggctttttacctgggtgatgacatccgcactcgggtctttaggaccttacccagctttcgttctgagccagctttagttcttcatgcttttattaccacgttgactactagaataggtacatcactttctgctcccgccgctggccctgcaaaggctcatttccttgcattcagatcccactgtaccccaaccatttaccacttatcaaaagtttatcattctttaaagtgtttaacttttgactccttgcgtttttgttttgtttttgtttttttgtttgttttgtttgtttgtttgtttgtttgttttttgagacagggtttctctgtgtagccctggctgtcccggaactcactttgtacagcaagttggccccgaactctgcctacctctgcctcccaagtgctgggattaaaggcatgcgccaccaccccggctgactccttgccttttttaagcaataaaaatggtcatgtatttcttctttttgcctaaagtgcaacccaagatgaccagtgaaatgctaccaccttcctaccaccttattccttgaataatgttttctgtttgtttttgcttttactttgcttaacagtttaattcagtcaaaatctcctttgagtgtataaaccccaaccattttaaataaaattctatcacaaaatgagatttcaaatcatgtgacttattgcatgttttacctgaaatgagagaatagaaaatgtgagatttttttttttcattttttttgtgttccttttcctgtggggttggaatttggggcaaaacatctctctctgcttagaaacctctcaaatcttcctggcttcctctttcattgttctctcaccacagaggtaaaacttactgaagcccaactacaagtagattaagaaatgtagtgaccacaacctcttcctccctctctctttttcttctacatttgtatgtgtgtatggttatgtgtattcacatgtgttgggataagtgtgtgtgtgtgtgtgtgtgtgtgtgtatatgcgtgcacatgtgtgtgtagtctctgggttgacatcaggcgtcactttctctcactgaaccccaagcatgtcattttggctagtctggctagccaccttgccctaggggttccttgtctctgccttccactcattgttagtataggaaggtcacgagactcatctggcctctacctgtctcctggctgtctcaattctcctcacccttgcatggcaacccattgaaccatcatcccagaccttgtcttctattcccttttattctcccccttcttcttcctcttcttcttcttcctcctcttccttctccttcctctctgtctctgtctctgtctctgcctctctctttgtctctgtctctctgtctttctctccacctttgtatgtttatctctatttttagtgtctttgtgcatgtatgtacatgggtactcaagtgccatggcacatgtgtggaggtcagagggccaccatgtgggttctagggaatcaaacatgggttttcagacttggcagcaaaggcttttaccagctgagccatctttctcttgactcttgataaaacaaacaaacaaacaaacaaacaaacaaaaaggctcttgctgcagactcagggtttccctggcagaacactttctaccagggacccacccccagcagccacacagtctaagacttcccaatggaaactctgaaagccagaagggcttggatggaagttttacaaactttaagggaccatagatggcagtccagcaaaactttcagtcacgatagatggagaaagaaaaacattacatgataaaaaattaaatttaagcagtttctaccaacatatctctatagaaggcactagaaggaaaacctcggcctaggagattaaccacatccaagaaaacacaagagtaaggaatcccagaccagaaaatcaaaactgggagacttacaccacagtaccaaaatagcaggaataagtaaaaactgttcattcataactctcaaaattaatggccttaattccccagtgaaaggacacagactaacatgaaattaggaaacaggatccacagggctggagagatggctcagctgttaaggtggaacaacaatatgaactaaccagtacccaggagctcttgtctctagctgcatatgtatcaaaagatggcctaataggtcatcacttgaaagagaggcccattggacttgcaaactttatatgccctagtacaggggaacaccagggccaaaaagggggagtgggtgggtaggggagtgggggagtgggggggggtgggtatgggggacttttggtatagcattggaattgtaaatgagctaaatacctaataaaaaatggaaaaaaaaaaaagcactgactgctctttcagaggtcctgagttcagttcccagcaaccacatggtggctcacaaccgtctgtaatgagatctgaagtcctcttctggtgtgtctgaaaacagcaacagtgtactcactcataaattgagagagagagagagagagaaagagaaaaacaagattcatctttctatttcatctaagaaacacaccttactatattatatattaccttagcaaaaagcatgggaagaaaggtattccaggaaaatggacttatgaaacaagcatatatagctattctaatatctgataaaatagactaaataaaaaactagtcagaagaggtagggaaggacagtacatattcatcaaaagaaaatccaagaggattacgcaccaaattacaagggcacccaggtttgtaaaagaagcactaccatagctaaagtcacatgttggacctcacacagtgatagtggatgacttcagtacctcactcttgctgacaggtcatctgggcaaaacctaaacagaaatgctggagttaaataatttcataaatcaaaggacagataatgtagagcatttcatataagcatgtacatgggcttgcgcacatgcacacacacacacacacacacacacacgcacccacacacacgtgtgcgcgcacacacttacctacactttcttctcagcagttcatggaattttctccaaaaagcatggtattggcatggtatttctcacacacttaaacacacacacaaataaatttcttataatcaaatataaggaaattgaaataacaccctacaccacagattaaaactggatattaataacagaaataacagaaaatatacaaatttgtggaaactgaacaaatgaaaaatgggtcaagatagaaatcaagagggaaattaaactttttttttataacggattaacagtgaaaacataacatacccaaacctatgggacacaatgaaggtaattctaagaggcaagttcatagcactaagtacctacacaaagacatggagatcttatattagttactaagcaacacctgaaagttttataacaacagaaagaaataataagactcaggaattaaagaaacaaactagagacaaacttgtaatataaaaactttaagacattgaagaaagaaattgaagaagacactggaagatggaaagatctcccatgatcatggatgggtaggattaatgttttaaaacagtcttctactaaagcagtctagattcaatgcaatcctaatcaaaattacaacacaagactgaaaaaaaaaaaaccttcaacttcatatggaaacacacacacaaaaatcaagacagctaaaacaatcctgaatagtaaaaggactgatgaaggtattatcattccagattttaattatatcatctcagatttttttgttacagagatataataaaaaaaaaacccagcatggtattggcataaaaacaggtatattgatcaatggaataaaatggaagacccagacagaaagccacatctctgttaacacaggactttttgataaagaagccaaaagtttgcagtggagaaaaatacagcatcctcaataattattgccagtcacactggatggctgcaggcaaaagaatgaaaatggatacatatttactattgccacgaacagaagtccaactagatcaaggacttcaatataagaccagataccctgagtctgatagaagacaaagtaggggaataaacttgaactcactggcacaggaaaagactttctgacaggatactgatggcacagctactaagaccaacaattaacaaacagaggctgaaaaacttctgtatgccaagcgacaccatcactaggacaaggtagtagcctaagatctagaaaaagatctttaccaattatgcatctgatagaggtcttgaatttagaatatataaagaactcaaaaaaaaaaaggaaaaaacaaatgacccaatttaaaaattaggtgcagaactaaacagtgttctcaaaagatgaaataaaaatcactgagaaacagagaaatgttcaacactttagccatcaagaaaatgtaagttatgactactttaaagcttatcttacaccatatagaatggccaagatcaataaaataagtactagggcatgctggccagaccgaggggaaatggaaccctaattcattgctgctgtgagtgcaaactggcgcaaccactgtggaagtcagtgtggctgttctccaggaagctgggaatccatctccctcaaattccaataaaccactctggaactctccattctgctgcagagatgcatgctcatcctggcttccctattcacaataagcagacataggagacagcagagatgttagtcgaccgatgagcggataatgaaaataggggagaatttacacaacggaatgctagtcagctattaagacagatgaaattcctggcaaatagatgaagctagaaaaaaaagtcaacctgagtgaggtaacctagacccaaaaagacatgtttttctcttacatgtagatgttagcttttaagttttcaaaataatgtggtttgaacaaccacagaagataattgcttagtaagggactggatgggaggagaggatcttacaagggaaggaaaatagaatatattgttctggagagacaaagtagaaactagactagaaggattaagtagggatgggatgagagagaaaggcgagaggagaatattagctaacagcagaggccatttgaaaaaccatataggaagaagcccactactatagaaaattcctaaaatctatccatatatgagagaaacatgaatggagtaatccaatagtgggggaaacaatgccacaactatgatttttcagacgcaaggggtggacgcaaaggtgagcttacagagattgtgacagtccacacaggatcaagacatcctgagtctcagcactgagagtggaaagtggacacaggttctcacccctaaccaggaaggtatctgcagttgtcagctgctaggctgaaaatcagttttctccggtggagtctcattaggtatgtcaactgtacatcagggcaggccccatggccaacgtacttggctaacccaaaaggtactcagtggcatttttgtggacttttgtttcattctgctttgtttgggcattttctgagctttcagtcttttgcttgcttgttactttttatttgggggttgttgtgctccttgttttgttttttgaaagaggagagcaaccctgggtggatggggaggtgaggaaggtctgggaggaatcgggagagaggaaaaacataatgaaaatgcattgtttgtaaagaatttttaaaattagtcttgtggttccagggccaagtagtgtgatgttttatacattcccccagccagtcattcactcactcactccatccgcagggtgtcctacattgagttccgtgctagactctgaaaatatgaagaaaagtgattcattggcctttgccttccatgatcatggatgctaaccaaaattgagatccaggagaggagggagcctctcttgccttttggcctttgtcctggccatgcagtgcctacagaggcgccaacgctgggttcatggccctggggatgctgcagtagcattacccaaaacatttctggaaatcctgtcagaaatccttgcagagatcagagaacacttcgtcttaacagcagactcagtggtctgagagcactttccttacagggagaacgagctctatttttttcaaagtgttcaaaaatatagaaagtacagataagtttgtaccaaatatttgagagttctctggatgtaaatgaagagttgacagcatcaagccctttactgcttttgcttgggagattttaagttagggaaagggaatttttactgaaaaacaaagtctctgttctgttccctcacgtgaccgatttcaggaggctgaggggtgtgtgtgtgtgtgtgtgtgtgtgtgtgtgtgtgtgtatacacgtgtgaatgtgtgtgtgtacacaggcatgcatgcttatccataagcggtgcattttgtgtgatcattaacattcaaacaggcccattagattatgcatcgtcagcttgaattaaatatgaggaagggggcttgggaatataggtccacgggagcactcctgctcacttgtacctaagtgaggccctaggtgcaatccggggtgataactataacgtcttggctatgtttgggggtgccttctcaaattgttctgagaacacatgccaaaagaagttctgaaagtgatttcagaaagacagctttatgtgggattataaagaacaatagtcgtttatataatatatgcaacctgatagtattatccaatcagtccttaacattataatcttgctgctcatttcctggagtggctgggcagacattaaaaaaaaaaaaaaaaaaaccactttctttatttctccctcagctggctgtaccgaatgatgcatttgagatctggatctaaatcacagtaacatgtttatttttaacacacgttttaaaaagcacccagtacagatgtttgtctccgtgccctaggacttagaaagatctgtccgttcacaaagggcttgtgtctgctcagcagtcggtttggatgttttgcctgggtaacagaaccatcacccctgcgctctggatgtctggtctatctgatgcaccgcagctcacaccagagaaactcagaggagtgaccatgggtacggatgctttcttcaaaggattctgacacacacacacacacacacacacacacacacacacacacagaggtttttttctgtgtaacatgaatgttcagtgaagctaaccactcctcatgaacatgctcagctgggcccaggttgactgaggagactggagtcctgcaggttgaacaatcctgcactaatttacaccacagtgagtgtcctttccttatgtgagtggggacaactcaggctcaaggtccactggcaaagcagcactccatatcctgctagttaaaatgaatgtctcaggcctccattgcagcttttgtttctagacatgagactgccctcttccctttaccattatggttggatattagtggataaaacccaccaatatctttcattccaaatcactgtccgttttcacagtatcccgtagaagggcaactacactgaccaattctgcaatcaaatgttatctattttatcttgttctctacttgatactttcattcagatcaacagaattttttttttattccttatgagttttctaggcattatatgagatttaaaaacaaaacaacacatcttgtaattcattcggatcaggcaagctaacataaatgaaatgttagagaatatagacactgttgttttgtgcggctggatgcaggtgaagggtagaacccagcttgagagaggctgtggctctggggtgcaagggcacatttctgaagaggtgagatttcagccaggctctgaaggacagagctgtggcggacacttggaacaggtaaggtgagaatgattgtgagcagtgtgagaatgtactaggggtttcctgagcagggtggtgagggagccgaagcccttctggtatgaagagatgtttgggatgaagaagggatctgatttatagacattgaaagggacccagtgggacttgagaagcaactaagtgtatattcactcactcatttctgcatgctgatgtgacgatgccttgcactgttctaagaatgggtggaattgagaataagctaggttgggttctgtgttaaaagaagaaatattccaaagaggagacaataaatgaagcattaactgaacaatgatgtgtcagttatactaaaggctatttaaagatatgaaagggcatatgaggcatggacacttacagcatgcctaaactaaagtatctgagagagcatctctgggtgagagtgtgagaggagtaaataagatgcagatcacagccttagaatcacagagagatcaagaggcagcagaaaaaagcccaagcattattaagtggaatagaagtaagaagtgagcgtggttcagcgtgcaaagcacttgctacacatgtgtgaggaccaaagttcggatccccagtgaaagctaggtaggcatggtggtcctcctgtagtcataggacaggaggcaaagacaggaatctttggagcaagctggctagccagtctagcaaccagagatcctgcctcaatttatgatgtgtagcatgcacacaaaaagcctccagtgtcaacctgtggcctcttaattttattcatgaacatttgcagcatccatgcatatgggcatatgcaatcacgtatgtacacacacctcacacaatcttggaacaaaacaattccattctactacacagagcagcaaggaatggaagcaaagagactgggggaagtggtatggggtaggtgaaactgatagggtaagagcagagaactgactggagggagagagaagaggcagctggggctgacttttggtatagtgtaggccacttactgagaggagaatcaaaatatctccatagttggatgtacaggtgtttattgacaatttaaaaatatttatttattttatgtatatgaccacactagggcatcagctcccattacagatggttgtgagccaccatgtgctttctgggaattgaactcaggtcctttggaagagcagtcagtgatcttaaccattgagccatctctttatccctatattgacaattttaatagagatgaaaatgtctgaacataagtaggtttacaggatgattaaaaattgaattggggatgaaatttagctgatgtttgtagtcctgtcacttggaacatgaagataggagaatgaggagttcaaggccagcctgggctacacaagatgctgtttaaaaaaaaacacagaaattaattgggaacacatgaagtctaatgtgtttattgacattccctgcaggtttattgtatccaagagaggttgttactggctattttcatgtgaaagtctgcatgtcatatatatttatgctcataaagaaaagaaagctttaaaaagaccttgataacattttaaaaggcaaaaaattatattatgacactgctttattgaaaaataaacatgtaaatatctctctgtgacaatgaccagatgaatagaaagatgtgtcataagtgttatccctggcaggtgagattgttcaaggttttgacttgtattcggggcatgcagatatgatgctctcaagggtttcttcaaagtcttgtacatttaataccatccggattcctctatggacaaatgagataaaaaggtgatagggatacatttatgaaattgtaattttcataatttaaattgaaaagttagttttgagaggataagtttgaatttctcttatagggcttttctttaataatcctgccctggggctggtgagatggctcagtgggtaagagcaccagactgctcttccgaaggtcaggagttcaaatcccagcaaccacatggtggctcacaaccatccgtaatgagatctgactccctcttctggagtgtctgaggacagctacagtgtacttacatataataaatagataaatagataaataaatcttaaaaaaaaaatcctgccctgaccaattcagatgaatgtcaagaacccaccatttccacagggcagtctgagacacagtcttgatgtttgagacttaagtcatggacagtgttgattaggaagtcatctttgaggtgggaataggaactgcaggatagatacatttggggggaaccattgatatggcccagcaggtggcacatgccaccaaacctgatgaaatgagttcagcgcctaggattcatttggtagatagaaggaaccgactcctgcaagttttctgactttcattgtgacacccacctacccacccagaataccttttcttctagagatggacagtaggaaaagaaaaggaatgggctcagaacacgagccataccaaaagagaactgtgaagaggaggaagcgcgtggccaaggtgtggcaaactgctgcgcgcgctaggaaacggagctggcgcagcagtgcacggccaggtgccggattccaggggtgaagcaggagcactggctttcccttgttggttcccggaatctccagaggcagcagttttaggaactgttcgaggaagtcaggtctcacagggttggaggttgaatcgatgcagaggaaacggaggaagctgaccgaggccactccttttaaacatctgtacagacagaaagaagtgggacaatggtaaccagaaactccaaggaggctgcagcgttacccaggcagagcaccacccagagaggatgttcgggagtgaggaggaggaggttcttcagtccattaagtcaccaggtgtggatgaaggtgcttagagtacttgatgctggccagtgagtaacgaaggctagcgtttgtactagcatcgaggctttaaaaatctggctttcatgatggcgttttctaatgaagtacaatgataaacattgtgctttacgaacattcatctcctcattaccttcccttgtcttctctcttcacttttgctgggccccttcaaacatctgcttcccctgcctctgcctctgcctctgtctctctctctctctctctctctctctctctctctctctctctctctctctctcacacacacacacacacacctatattcttcccatgaaagaaaatacgcaacacttgtctttcttgtcccaatacactcttcttgtgtaaccctctctttgttcctttcttcccacacagccccctcctactttcacagccctaagagttctcacggcaagtcataatgttctacttatctgtcttctacgtaggagattctgagacatgacactttcatagacagcatttcccttaggaatggggtacttattttggttttcttatgtttacatttagcttcccgagtctggagagatggctcagtgcttaagaacacgggctgctcttccagaggacctcggtttgattgctagaacccacacggcacctcacaatcatctataactagaattccaggggacctgtcttagttacgtctcaatatgctgacaaatcaccatagccaaggcaacttttaaaaggaagtctttaatagggtttgtggttgcagaaggttggaacccgccatggcagaacaaaggcacggtagtggcagaacagctcagagatcacatcttgattggcaagcaggaggcagaaaggacactgggagtgacacaagtcttaagaaaccttagagcccagtgacatgtccccatcaacaaggccttatctccaaatctttcccaaacagtcccactaactaaggaccaagtatttaaacacataaacccatagaggccattcttgttcaaaccagcacaagagccaatgccctcttctggccttggtggacaccaggcatggatgtcagacacagacatacatggaggcaaaacactcataagaataaataatcttgagaaaaaacaataaacatatcttcctgtgtttgaggtagaaaatgacagtactttttattctgacacacacttgtgagttcatgtgtttcactgttaagagtcctaagtcctggaacatgaaatcgtttgatttaaagagaagtgttttcagatataattgagctaaagttatcctgttaggctagtctcaaatcccatcactggtatcccatgggaagagcctcgggggtgtagaggcagccattgggatgactgaggcacagtggctctgtcaaggatgccagacagatgctaccagatgcaagaaggcttctttgtggcaccttcccagcaggtatggcctggctgacactttgtttcagttgttgtcctccaaagctgtaagagaatagtgtctatcattttaggtccagtttgtggcaaatttctgtggctgccctaggaaactaatacattctaaagttttgcaagttaaaacaacagctgttttttttttttgttcgtttgtttgtttctcctattgcagcagtctggctgtttgggtcgggccagctgcacagctcttctgcaggtttcagtttgggggagttatgtcacagttacttggtggcaggggtgaagtgggaagatggcctcctgcaggagtccaggaacttgattctgactgttggataccctccccccatctcccagggtctcttgatcacacctagctttctagcatccttacaaggagcatgagtattctaagaggaccgggtggagggttcctgaggcttatgtctggaactgagctttggtcatctcaggactcaagtaggatgatgatacatgatgcctggcccttttactctatcatgtaggctatgggagagatgatcctgtccctgctatcacatatgctagggggaagatgatcttgttgccatgacaaccttcagatggtatacgctgaaggtcttacctttccctgttcacatcatagtacccattttttgggcaggaagactgtgaatgggtggcactgactccctcaaagacaccagtgagtcagcctttgtgtgagactctttggtccatgggagacatctttgtgtctggaagaacaaatcatagctctgcctggaggcaggtgaacacacttaataacttcttaggcttctctttaaccctataattaccctgatggagcccagattgcacagctgtctgaaacagaatggagtttaggggcatcagagagaaagaggcctgagaagtgccatagtcgctcaaaagatctggatacggggcagggttaggctggaatatgatcaatagctgctgtgagcaacaatcagactgtatgtagaggggttatctagtttttcttttcatttttatttgttgtttttttttttgagatagtttttaaaaatatagtccaggctggtcttgaactaacttatacctcaggctaacctcaaattcatagtgattctcctgatactataaatgtgctgacattttaggtgtatgctgctctacctgactctggtttttgttgtttgtcatattgtattgtattgtattatattgtattgctttcttctcaataagaatcacagtgtttgggttcatgagatccctcatcaggtagagttcaatccaggagatgacaagagaaatgattccacagagttgtcttctgacctccacacatggcacacatgcgcacatccgtgcacacgagtgtatgcacatacacacatatatgagcgcacacacgggcattcgtgtatgcacaatggggggtgaattcaaattcaagcacttggcagtgagcatacatacgtcatggttcatgtgtcgatgtctgaggacacattaggaaatcggttcgctccttccacagtgtgggtttggaactggagctctcaagcttgagagcaagcaagcacctttaccagcctcaccatatggccagcccagctgcttctctgtaatgctctgctgtgttgtggctttcaggttactctggcatcactcagcaggtgactaggatggtgacatagttcttaaattcctcaacttgaaaatagtgtaagaagtttcctttaggctgctagtcaggactgctcccaaggtctgttgatacagggtgcatgtgctggggaggtggaggggggcagtggatggacagggggtcatggtacaagcctagcagccagctccatcagccactcatctctgtgaaaagagaacctgaatcttaggtagacatctgtgtcatggattacagtcccagggaaggagcagagtgttgtcctcatgtataggcctccctctggtttgctgttggctgagaaataacaggggtatggtccgcatcacagggtctgggtcaggtctacagtcagaggctcatggaaatggtgcctaaggtgctggagaaaaacagtgaggattcaagatggatttgtaagtcaggagtggatgaccagattggggaggggacagttcaaatttgattacagtcaagaatgccagaagccccagatgtaactctaaaaatcacaccaactgctccggaaccaggtacttgactgttctgtttttgtattgtttgtttgtttgtttttcccttagaacatctgaatttaaaatgttttaaggaaaccctacaaccctgagatgtttctttttaaaatatttgtttatttgtgtattttacgtatctgagtgctctgtcttcatgcacaccagaagaaagcatcagatcccattacaggtggttgtgagccactatgtggttgctgggaattgaactcgggacctctggaagagcagccaggtactcttaaccactgagccatctctccagcccctcactgagatgtttctagcagcttctctgagattgattttgagttcctacttgccaggagagggagcctggagtacttacctgagaggaagagacattctaaaagttcactcctgagtaacttttgctatagcctgtttccggtctgcgacaagagagctgagatgagaaattgaatcacttagtgtccatgactgggtctccgtgggttagctggctcccgctttagtgacagttgagtcacctgctgctcagtcttcccagctggtgatagatgccacagtgatagtaacaaccacagaaaactgtgtggcctcctgagtcagaatccagggaggcagacatgctcctgccagctccgttggcactcagagcaatgtttgcaagttctttgctttcctccgtcttggtttttaccacctgtaaaatagagacagtaactctcccagctcagaggggtcctgtgatgtaggtctgaaaatgctgcgaagaggggagcactgaacatagtgatgaggtacctgtaagatgggtttgtttcagctgggtgttatggcattcgcctttaatcccagcactcgggaggcagaggcaggcgaatttttgagttggaggccagtctggtctacaaagtgagttccaggacagccagggctatacagagaaaccctgcctcaaaaaaaatgggttttttctgtcattatgtaataaggtgatgtgtatagaaacctgacctacagcaagcagagggtcgaaacaggaagtcgattaatatggacatgtcaatataccagaaatggagtatgtaaaaatgtcaagatgacagccaccacaacattaggagcatacagcagttgtagtgtcatgtcaacacactggaggttgaggcaagaggattcaaagttcaaggattcatagctggggctatgcagtgagagccttccagtaaagaaagaaagaaaaatatttcacttcacttataaatacagctaatatttacaatgggcatatgtatacacatgaatatagaagcacattgcttgtactttgttgtaaattttgatggaaagacatttaaaggaaaaatgaaaatttggatgttaaatttctcaggaacgctgatgttctgaggactggaagagatgaaagatcctaactaaagtttcctaaaagtacctttattggatggttttagttatggcaactcttataaagaaaaatatttaactggggccgacttacagtttcagaggtgtactggctagttttgagtcaatttggcacagctgggtttatcacagagaaaggagcttcagttgaggaaatgcctccatgagatccaactgtaaggcattttctcaattagtgatcaagggggaaaggccccttgtgggtgggaccatctctgggctggtagtcttgggttctataagagagcaggctgggcaagccaggggaagcaagccagtaaagaacatccctccatggcctctgcatcagctcctgcttcctgacttcctttggtgatgaacagcagtatggaagtgtaagctgaataaacccttccctctccaacttgcttcttggtgtttgtgcaggaatagaaaccctgactacaaatagaggtttagtccattatcaccacagtagaacatagtggtatgcaggctaacatgtgctggagaaggagccgaaagttctacaacttgatctacaggcagcaacaggagactgtgtgtcacactgggcatagctttgcccgcctccacagtgacaaacttcctctaacaaggccatacctcctccaataaggccacacacttgcaaatagtgccactccctatggccaagcattcaaacacatgcatctatggggtcataactattcaaacgaccacagagggcatcatatgaattattctagctattttcaagaatctataaagcagacatttgtgggcaacttatatatgcttgaagagaatacagttatatagaatatgagaggagaagaataatcatctgtctaacccgctcttagccttgtgagctacaatcatgcctgggatagcaagacacgcccactggtagtgtaatggtagcatggacattgtgggagtaaccgaacattttatgattggatttaagtccttcagtacaagacgaaaaaacaaagccaacacccaaaacctgtgactagacaagtcataggctgtaggggaaaagttcactactatgattctgttaaatggatatgttattaaactgattcctagtagcttaccatcacacccgtagactaatgtgtttcttagccctcatcagcaaagctccttattgcagcagatgactattagttcaggccatggtgcatagagtaatagacttaggaatactcagccctgaaggtgacctctgggtcctaccccacttttccagggctcagggagtattgcggaagaggaagggaagagcaaaagccagaggtggtgggtgactacaaggacacgatgtctctggacacagcagggcatccacacatatggacccacagcagttgtgacagcacacacaagacctgctcaagcacaagcctgaaaaacaagaccagaaaataaggatggtgagaggcagtcagcaggacgatccaccccaattcaggaactcttggcagttgataggttctgggagaagaagggtctgttttccttaagaatgtagcccctggtgaggcaaccacactgcggtggaaggtcactcatccaggcccatatgggctgcatacatcgtacttgataggtttggggaaatggtgccgagttgtgcgggtagtgaaggaaggtagatttgggaaggattgggaaggggaatatgatcaaaactattgaatgaagttctcaaagaactagcccaaatcacttagaagaaccattaattaattttgcataatttcttctttataaccaaagctgtacactggttaaatttaagccttgatgtctttatggtgttcttagttatcatattcactcatgagagactcgttcctgagtaccaatgtgtgccagacaccattagagtttggtatgaaaagctttcacgaatctcctacttgaatggtgacgtgtccccagtaccagatctatacccaaggtaatatcaggtaatgatgccctgttccttgtcccttctctgttaagtagagagataataagataatagtctatgatgttgatatgggattgcagaagttatttgcattgtaaatttttttttttttgagacagggtttctctttgtagccctggctgtcctgggactcactttgtagaccaggctggccttgaactcagaaatctgcctgcctctgcctcccaagtgctgggattaaaggcgtgcaccaccaccgcccggcacattgtaagtttttaatgagtattattaaatttgtaaaaaaaatcattaaattctcacaaggaagaaatcagtgaactattttacattcaaagagggttttctctgtgtctttcagtgtgtctcagtctctctccttgtctctgtttctctgagcagcattttctcatttgcaaagctgtctcagagaaatgtctgttcttgtgtaagtttttatcctgttagatcagcttagaaggatgattgccagcctccaggttgtctctgagaagaaactgggacctaggcctaccaaaaatgagagctcagctgtgacttgtttgcttccttgcttttttttctgtttctttttcctcttctccttcctcctcctctgcctccttttgaattaaagtcttggaatatggcccaggctggcttgaattgcctcagcttcatcgatgttgtagttgaatgtccaaatctcagtaaaaaggtttttgttgttgttgatgatgctggtgtttgtttgttaaggtgggaggggagagagagagaaagagagagagagaatgagtgagaatgaatgaatatgaatgagagagttcaggttggccttgaactcacaattcttttcttaagtcctggaattacaggtgaatcccaccctactcagctgttaactgtggcctctcatttattttctgttttactgagaagtgaaaatgtcagctgtggaaaggtcaactatactttgtcttcactgatagggaaaccaaatctaaagtaggaaacgctgaaaggaaccaggggtataattcagatagagacattgagtgggttcattattttcttaagaccctgacatttattgggggtttcttgtgtcatgtatgtgcattacagtgtatgatccataacagcctaaaacgtgccttcactccttgcaggcagagatctcatctcactcaagacctgaacacagcactgtggtcaaacccaggtgtggctgagacgaagctgtgattttttatatatataaatttactctttaatctttttttttttttttttacagtccagactttatccctttcccagtcgatcctctctctgttcaacatcccacacctccccacaccccagcctctactcctatctccaagaggatgtccccaccccagcccctactccaccagacctccccactccctggggctccaagtctctcgggggttaggtgcatcttctctgactaagtccagactgggcagtcctctgctgtatatgtattgggggcctcatatcagctgatgaatgctgcctggttggtggctcagtgtctgagagatcctgggggtccaggttagttgagactgctgatcttcttctagggtcgccctcctcctcaacttcttccagcttttccctaattcaaccacaggggccaccaacatggtactcactaactcactaataagtggatatcagacaaaaaagtacagaatacccgggatacaatccacagaactcaagaaggctaacaagctgaagggtccaagtgaagacgcctcaatcccacttgggagggagaagaaagcaatcacaggaggggagttggggagggagggagggaccaaagctgtaattttaacaactatttttgctatcaccaactataggaatcaaacagactttttggctgaattgagtttttgtcgtggctgtctcttggggtttgattgtgaagtgcccttcataggctcttgtatttgaacacttggtctccaggtgatggtgttgtttgagaggactgtgaagccttggggaggtggagccttgcttgctacaggaagtaggtcactggggatgtccataaagttttccagcctggacccacttccattcttgctctgcttcatggctgcaggtgaagtgcacccatatagcctctgactcctctgcctggccttccctgccctgatggattgtattccctgagagtgaacaccacagtagatcctccttccttaagtgagtaatacgccatccatgtattgatgttgtttttccaaatgacagaagatattcagttttacctcagacggtcagaggactaactgtggggagaggtggactccgtcctctctgaatgaagcgagagaatctcacagctcctggcaatcttggagaggtctctccttatagaggcttggaaaaaaaaaatctaaagccttggaaccaacagactttttggctgaaacaagttcttgtcatggttatctcttgtggtttgaatgggaaatgtccttcatatgctcttgtatttgaatgctttgtctccagttgatgctgttgaattcctgtgtgaaaaacaaatgcagtttttatcactattgctcggtagtacagtttgaggtcaaggatggagattcccccaaaagttcttttattgttgagaatagtttttgttctcctggggttttttgtcattcaagatgaatttggaagttgctctttctaactctatgaagaattgagttggaattttgatggggattgcattgaatctgtagattgcttttggcaagatggtcatttttactatattaatcctaccaatccaattccatcttctgagaccttcttcaatttctttcttcagagacttgacattcttgttatacagactttcacttgcttagtcacacaaaggtattttatattatttgtgactattgtgaagggtattgtttcgctaatttctttcccagcctgtttatcctttgagtagaggaaggccactaatttggttaagtttatatcgagccactttgctgaagttatctggtttaggagttctctggtggaatttttggggtcacttaagtatactatcatatcatctgcaaatagtgatattttgacttcttcctttccaatttgtatccctctgacctccttttgttttttaattgctctgtctaggactttgagtactatattgaacaggtagggagagggtgggcaggcttgtctagtccctgattttagtgggattgtttcaagtttctctccatttagtttgatgttggctactggtccgctgtatattgcttttgctatgtgtaggtatgggctttgaattcctgatctttccaagactcttaccatgaaggggtgtttgcttttgtcaaatgctttctcagcatctaatgaaatgatcatgtggtagcgacaaaaactgtatggtattggtacagagacaagcaagcatatcaatagaatagaattgaagatcttgaaatgaacccacatacctatggtcacttgatctttgacaaagaagctaaaaccatccagtgggaaaaaagacagcattttcaacaaatggtgatggttcaactggaggtcagcatgtagaagaatgcaaatcaatccattcttctctccttgtacaaagctcaagtccaggtggatcaaggagctccacataaaatcacatacactgaaactaatagaaaagaaagtgggaaagagcatcaagcacaatgacagaggggaaattttcctgaacagaacatgaatagcttatgctctaagatcaagaattgacaaatgggacctcataaaatcacaaagcttctgtaaggcaaaagacactgtcaataggacaaaacagcaaccaaccaattgggaaaagatctttaccaatcctatgtctgatagagagctaatatcaaatatgtacaaggaactcaagaagttagactccagagaaccaaataaccctattaaaatggggtacagagctaaacaaagaattctcaactgaggaataccaaatggccaagaagcacctaaagaaatgttcaacatccttagtcatcaggaaaatgcaaatcaaaacaaccctgagatttcacctcacatctgtcagaatggttaagatcaaaaactcaggtgacaacagatgctgtcaaggatgtggagaaagaggaatactccttcattgctggtgggattgcaagcttgtacaaccactctggaaatcagtttggcggttcctcagaaagttggacatagtactacctaaagacccagctataccactcctgggcatatacccagaagatgctccaacatgtaataaggatacatgctccactatgttcatagaagccttatttataataaccagaagctggaaagaacccagatatccctcaatagaggaatggatacagaaaatgtggtacatttacacaatggagtactactcagctattaaaaacaattaatacaagaaattcttaggcaaatggttggaactagaaaatatcatcctgagtgaggtgacccagtcacagaagaacacacatggtatgcactcactgataagtggctattagcctagaagttcagaatacccaagatacaattcacagaccacatgaagctcaagaagaaggaagaccaaagtgtgggtactttgatccttcttagaagggggagcaaaatacccatgggaggagatacagagacaaagtgtggagcaggaactgaaggaaaggctatccatagactgtcccatctggagatatatcccatatacagttaccaaacccagacactactgtggatgccaacaagtgcttgctgacaggagtctgtctcttgagaggctctaccagtgcctgacaaatacaaagatggatgttctcagccaaccattggactgagcacagggtccccaatggaggagctagagaaaggacccaaggagctgaaggggtttgtatccccataggaggaataacaatatgaaccaaccagtacccccagagctcccaggtactaaaccaccaaccaaagagtacatggagggacccatggctccagctgcatatgtaacagaggatagccttgtcagacatcaatgagaggagaggcccttggacctgtgaaggcttgatgctccagtgtaggggaatgccaagactgggaactgagagtgggtgggttagtgagcagggtgaggggagatgggaatcagggattcagaggggaaccgagaaaaggggataacatttgaaatgtaaataaagaaaatatctaatgaaaaaagtaaaaaaaaaatacaaaaaagaaagaaaagcaaagcaaatgctgtcttgactgtgaagaacaacaacaaaaaatgtgttttcaaactaaggatccctaacctttgccctagcacatcatcagactagaacaaatacttagcaacactactgcctggcctccaggggcacagtcagttcagggaaatagtgcaagaagctagcatttttgagatgagaaggaaaatgttttggctagtgggaagtccccatgtctgcatttctgagtaagaaatgcatctccatgtacatctgaccctgcatgaccagggcgcatttctgaccctgaccctaatgttgctaacattaggactcaccttgcaaacccactgaacatgagttcctggggttttgctgttgttgctgttggtcggttggttggttgggttttttatgtttgtttgtttttggtttttttttgttgttttgttttgttttgttttttaatctcagaagacataatgtggtgaaagacgtcctagttctcagagttgagttctggtctctgtgtgccaccagtttaaggatcgtatcagcaccctaacagttcattatttgctaactgacactgtcatctcaagcgtccctgggcaccctatgagtgccacttttaggtccacctcttcccctgactcccattcaagggctgcagatgaggtgcagggtatgtagcacttgtacatcatgtgacctgaatctcgagagctgataccacatgtgtttctcaccctgccccttgggagcttcgggctcacaacaaaccattctctgcagctcccatcctcaaagatggcctgttgggacctcctcctgcaaaccttgatttgatctttaatggtagctttcaaatgtttgtaccacaggtgatggaagaaaatatattttatccagttctcactctctctgtcctacccaccttcccttgctccccccctccccacacaaacacacatcgtttggagaacagtatttaacatatactatattcagtgtactttgatctaatgtcaaagcttatatttcccctttacacacatagaatactccctttttaccttagtacttgcctcaagtttcaacatgtgactggttactaacatccctcactcgctcccagtggactgtaaatttcggtagggtagaatcggttctaccaggacagacctccagaatacacagggcatctgggttttcagatcactggtctctttgctcacaccgggcaagttgatcgttctggatcatcctcctttcccgaggttggtagctggtttccagggttacctctgaggcctgggtggcctctgaattgttgctctgtctatggtgctgtgagctatcttcagttagcaacctgtattacgtagccttctaggataaatccttttatagtaggtagctcatgaagaatccagaaaacaacgtcttgtaatgaagtcagagtcttgaacactgatgattttttttcccaaagccccagggcggctgacctctgccccgctgtaggctgacatcatttgctgtacgctgtgaatgaggaggaaaagcccgtaactttgtttatgcagattactttttgtctgacaaagctgcaggagtagaaggagcaggaggtgatttagaagattgcttccgtatggtgagatggcatttcttcaggatgatcccagtctccgagtgctcatgcttttgtatctggaggtgtggacccgtgattgataagcagtttctccattttcaaatgagaccctcaagaagcccaagaaaattagacagaaggttataccatggagggaaaaatgagattaacattctttctttctctttaagacaaacattgacattaatagtccttaaaaacattgaaaatcccggggagtcaagatgtcgggttccaagtataagcctgcgcccctggccactctccccagtaccctcgaccctgccgagtatgacgtgtctccggagaccagaagggcgcaggtcgagcgcttgagcataagggcccggcttaaacgggagtatctgcttcagtacaacgaccccaaacgcgtgtcgcacatcgaggatcctgccttgattcgctggacctatgcaagatcagcaaatatttatcctaatttcaggcccactcccaagaactcacttttaggagctgtggcagggtttgggcccctcatcttctggtattatgttttcaaaacagacagggacagaaaggaaagacttatccaggaaggaaaactggacagaaaatttaacatctcctactaagtttggcaaggatgactattcttgcataaataaatctattaattaatcaccgaaaaaaaaaaaaaaaaaacattgaaaatcccatgtaaattatagatgttgagtatttaataggttgggggtttttgatgtggtgtattttgtttatgtgtatatgcacataaacgtgtgtgtgtgtgtgtgtgtgagacattaggtgtcttcctcagtcaccttctactgtatttttttttttttgagacagcgtcccccctgaaactggagctcacgtgtgggctaattcggccaattagctccaagaatccccctgtcctgtacctaacgctattaatctgcctcccagtgctaggaccatggcctttccattacgacacccagcttgtcttgtgggttccaaggatccttgtatgtgtggcaaacattttaccaactgaccctctgttcagaggctggttggaattgtgctgaggaggccttgctgtgtggtatagaccagggtggctcaaacttgcaatcctgcctcagtcccctaagttctggcatgatagacagacaccagcatgcatggctaaaaaggttttacattttcatattttccagttagaagttattaaaaatattttcattcttaggtagaatagacctttatacatttttaaatgttcatatttgataaatgcaatgaagttctttttattcaccatactcttacctggaattttctgcttcattttaaattgtgtttaaagtcaggagaaataggaaatgattttttattttattgtctttactacttccacacttcactactttaactgaagaagcttttatttcctacagcaagcctttggtagtttttgttttcttttttcttttcttttctttttttttttcatttaaaaagcttaaactagtttcacaaagtgtctgtttgaaaagtgcaatcttccttgggcaatgatttccagtctacctccagctggtagagtcactgactctaaatacaaaatgtctaattgcttcactccctagtgcgtactgcactaagagttcttgatgttaaacaaggagagttgcttaaacaagatgtagaagctgcgttgaagccccagtagatccaagaaaagaaattgcattaagtacagtgcagtgtctctgataatttggagtagagatcctcatttgaggtgatggacagttgaactatggtgtcactaccacctaaggtatgtgtcctcagagtttcagaagggctcagtgcccttgctttggatcttgtctctgctgtccttgagctgtgcctctagaacaagttgacatctcccttcagtctcccactttgaacgttcagtgtggcctgactccttactgattttagtgtgttaattttgtcttccttcctttctgtagctcctttgttctttttccttaaccccctttaaagccagctccgctcctccatccttcagcttggtttggtgtgtggcgggtcagttcactgagttactggtcatagatttaattgcatttttactgaggtcatgctgttacaacagggttgctgcctgaggaagtggagccaattctttgaggccgaggcttatgaacaggctcaacttgtggacgggcattttggtgtggccgtactgctgaatcctgggtagctgagcgaggtgtgggcaaacatggatgcacactgtaggacaaggattgcccctacatgaatgagttggtcacaggaggccactctgtcccacgtggaagccaaaaccatttctcagttctttctttgtactgatgttgctgcattaaacaccaccaccccccaccctccaccaccaccccccggcctgggacttcatgggatggtgggaagtttcccagaatcttggatcactgctaaaggactggcaaacatccaggtcccgagatagcccagtgacatgaagttgagggtgtgctgcctgcagcagagcgttcgccccatcctcagcttgctacaccgagttccgatgcccgacagtgaaccctctgcagcagtgaagaagtcactgtgcaaagcccagcccgcctcagaccacagaagacgattacctcccagaggtaaccgaaaagggaaaactcggcgtgtctcatatactgccagcaccatgctgaaggagatttaatgtgtgatattaagcctttcttctctgttagacttggcttgagtgcatcacatctgccagcctacatttagcccttcaaggatattcttttgcctttaattgtggcatctagacagtcagcgtgaaaccgctgtgaagcagtcgccggcccaagggtcagtccttcatctttagaatatgggcggtgataaggagaatctgtgtcctgaaaccatgtgcacccctgtctgtcctccacaagtaaaggtctttcctctgtcatgtgtcctggcgcaaacatttaccatgcctgcaggaacatttggggctctaggcatgcgggcacaggaggcctgtgctgtttaatattaaaccaacaggaaatgacccaggctcatgggctactgccctcatagggcaaaagaggagaaattaattgctttatagaaattcctttctgtgttctgtagagaaaatgtttccattgggcctaaatgaccaaaaggagtagtttggggctaaatagctttgacattgtgtcctgaaggaatgagacaattaaagaaactaacttcctctgagaacaactatttataataatttatctgcacaacatgtttccagacttcattggcctggggctccctggaattgcccgtgtgtgtgtgtgtgtgtgtgtgtgtgtgtgtgtgtgtgtgtgtgtgtgtgtgcagggtctctcattggcctgggaccctctgattctactttctactaggtggatccccctccctggctctgggaatataggctcgtgctagtgaagtgtctgtttagatgaatgctagtgatcgaattaaggccctccctcatgttaacatggcaagcactttacccactgtccgtgctccagttcccttctttttccttttctgtcttttcttttcttttttctttaatgctttcccatgcttcaggaacaagaattacctggaaccccaccccctcacccccaaatgtatgcaggtactgcgattggaaggaaaaacacatttgaaggacttaagggggagaaaagtcagtttcagaaacggggtcagtcaagaggcagagctaagagctgcagtgtcctcccaaggatgttttcatggggcttggagaccaacagcatctgatataacacacagtcaagtcagaacaaaaccagggctgtccagcgaaaggtcaccagtggttttatcttgaacagctactgcagaacattgaagtgggggtaaggagggcagaggggagtggacagaggcgtgtagagcctgcttgtcaggggaagtgggtcatgctgactttgaggcatgctgcctgtggaggaaaggtttcttatgggagtggggggggtggtcatgggatgcagagaggaggctgggcgtagagtatcttaagataagatgtgaaacccggggtaaggagccatcttgagttaggccgtaggtacctcctcttcctgcctttgcccacattccaggaaaagtattcgctgcaataacagatttttttggacctcagagggttcactgaatttcatgatgtttggcatctatccatagttgaaacaagaagagacaaaattgtacacccggagaacatcagagctgctgagaaatgactctcctgtaattttttttttttttgaagcctgtgcccactgctgacatgggtgtttgcattacccttggagcatattccacagttatttacccatgaaggattaatgatactgaagccgggttcaatggcttcgcagcaggctaaacctgttcttttcaagggttgggaaagccttcacatgcctcgctctctgtcactgatctcccagggaaaggaaaatacccaaagcccagctcctgggacaggcttctctgaagtgttgctggaatgactctccagcagggctttcctttcttcaattacctgtaatgtcttgtgcaagtttcttagcctttcctggcctcagtttccccatttgcagagatgaatctttaccctgtttggagcgtgcaaagcttaaatgagctcatcaaaacagtcctagttagacagcaagtactctaaattattactgacgttcttttaaaaagtactgcttaacattttctatatttttaaattagaatataatggcatcattcccctctccaaaccctccacgtacataccttactctttctcagattcatgcctttttctttaattattgttatacattatataaatatgtattatttatttgtttctatatatttcttaaatatatgactacagttttcttattctgtatgttacacacacacacatattataatttcagggctggccacttgggattagataatcagttgggggtggggcttcccttgggaagactattcttctctcagtattccttagttgtctgtagttcttgtctgtagcttgcattcttaattactgtagtaatagtagggatggtggtagactcttctgatttataaacatgataaataatctcattactcagaatatgagattttaaaggtacacctaaaaataagaatggaacttggctagcacctatggtctgagaaccctggggccattcttacagccgtgacagtttgggggactcttccatttctctctcctccactgctggccccactgtggccatttacctcaggactcttctcactgacaggttctctggccttaccgcctctgcctgctgagccttctctgtgtcgccagtctttccccttggtcatgtgcttagctgtgctaactccttcgccctagacaacagggtttaaacaacaggcactgctcctttcaaacttaagtggtttgtaaatgagagagaatgtcgacgattatttcttcctacagttgtttattttacaaactgcctttgtaaacacccttacataaatgtatacaagctttgtgactaatttgtgttggtagccagtgtgcatataaagtactgttacctagcaatttagcggaaagtgaagctatgggcagaattagttctagggtgttctaaaacacaaacggttttattctgtccttgagagagggggttgattcagagtctctttttttccccttagactagctttgaaacttgacaccacccttattattctgcattccttctggcagagaactataccccaattttatgtttactatttgggaactacactggagagcagtttaataaaactcacgaggtggagactaatagccataactcggtagtaagaaccaggcatagttgtaggctcttggtgggtatactgttgactaacaaagaatacagatctcacagagatgcaattctgtttcagaattgattaggggttaagaccatccttctacattctcctatgttctgcaagtgtttgaggacacaggaagagcacacttccttctaggcagtgctgctcaatgtgtcaggcttagctgagcatgctttctgaagggaaccctaaaagtagtcagcgtgcacagtccagtttgttcactgtgtgagggatacatattacctttctttgattttccccttcttttctttttttcctctttccttactttttaaaagttttttttacttattctttgaaaaatctcataacaatgtatttgattatattcatctcccttttccaaatcctcctaaattcttcctcaccttcgtaccattccaccttttgtctctattctctccctccaaccctcccccccccgcccccgcccctttccctcactcccctctcgtagttgatctagtccagtgtgtgttgagtgactgctcctatgtgtggagcctgctttggagtatgggcagtataacaaacatcactcattgaagaaaaccgactttccctctctctccggcagtaatcatgtcaacagctccatgctgggattttctctggcttgagcttgttcaggtcttgcgcgtgccgacacaatttctgtaagctcacatgtgtgtctgccctgttgtgtctggaaaacaccatttccttgaagtcacccatcacttcagcctcttaaaatgttcatactccctcttccatacagatccttgaactctcaggggaaggatcgaaacagacattccgtttagggctgaacgctttaaaaaaaaaatatgttcattttaaaaaggttatcgttgtcacaagaatgtcagcactaaacaaagtcaagaaggcacacagttgactacactgtgtaagaaacttaggaaaccatgggggacaacattttagatccgctggctgccgttccattgtatttcctgtgtattttcatggtaaaaaatgttccctattttctttttaattttcatttattttatttggagattataatgaattacatcattttctccttccctttcttcttctaaaccctcccatatactccttcttgctttctttcaagcccatggtctgttttttttttaattaattgttattatacacacacacacacattttttttcataactatgagagtacaacctgctagggccaaggtttttgaagtcttttattctctgttcattgaagttgctgttttctgttcctatctatcacaagccctgccactagtcagtgagtgtagctatgaggcatgggactcacacctttagcagaatgatagtggattttaccataggacccatccatgccctatgtagccataggctttcggccttattgactgtgtcattttgtagagcaggccttacacccatcaaatccaatcttaaaaagtgattggctcttcccataacattcatgccacgtttgtactagtggatatagttttgctggtcagatcgttattgtaattcccagggtgcgtagctgagtgagagtcctgattccttttcttctccaggagtgtatgtagtcaccccagtagggatggagcttccagttaagtgctgggtagatttctctgcgctttatgactagagtgtgtgatgtccttagcaacagagttaccagcaagctctggatgacagtcaagaacattggaaataacttaaaaggtttggaggaggagcgtccatgagataccattgaccgacagctcaaaagatgtaacccattcctggtactggggttttagttcatggcatttgatgtttagatgagctgtttgttctgacagtgtggggtaatctgcatttaaatgactatagtaggttttcacacagctttgtcaaaaggcctcagagttgttcctctccatatttcctcccctatcctgccctctcatcccaaccccattaaaatccttccagttctaaagtaccttgagaaacttgtttctatagtataaggagccaaacatttacttttaagggcatttcaggaatttgaccttgtttaattaaggatctaacatttccatttccctgattggggtggggttggtgggggtgaagagttacatgcaaaaccaaatgtgtttgagatctgctttcatcttcgtgagaaccaagtgtgccttattcctgagatttgaggtaggcttaatggtaaggtaggtttctcagcaagcctttctgctggcactggatccatagggcaggcttttcctcttctctaaatgctcttagctgcagggcacctgaacccctgcagttattagagtgtgtgctctgtctgtgctctgtctgatgaatcacagcctctggagaggagcccagacatcttccttgctgaacagctccctcgcttatggatgctgtaatttgaggatcacttccgggaagaggatcccaggacagactgcaaagtggactttttaacgtttgctaacgttagcctgttgatactgccttagtttgaattctgaggagtttcgtgtctaagttctgttgtctcgatatgtaaaaggaaagtgtcatgtgtattcccagctataagcatcttgcataatcacctagtaacgtcatagaatagcttcaggtcatccttttgactatgagactctgttaaatattttgaatttaagatggataataagtgcagaataagtcaatgtaaaagaaataaccgttttgtataatcttcatacttgccaaatgtctcctaaaaaatgtccctataattctgctacttttgtcctctgagcacttaccatttctaagtagtaagaataatttatgggtagtctataagttttgctgttttaagaaaataagtatgacattactcaagtattgcatttagagaaagatactgcataaaatactactttccaaaggggggaaaaattggccaggattctggacttaaaaataacttcttcgtccataactcagatcttaggactttaccaaaacaaacatagctggcatcttgaatagctatttcatgcacagactgtatttccatttgttaagttattgaaggggttagtgtattttactaagtgaccaatactttagtagcagtgagtgaagagcctgtcctattaaggacagaggtaaagcttttgcaggatgtaggggaacagaatcattaggctctttacgcaggatgacaggacgtttccactgatggtagtgatatcattgctcttggaggccgttggtagaaattgagcctcgcttttggaaaaggttctatgtaaagctaagttagtgtaactattccccaagagaggcagcgtcagatccttagagcaattgcttgataacttaggaagattgacattaagataacttagacattgaagttatttccagttctgcctgccaagcccatgttcccagaaataagactcagactcaaaatatatttacaaataccttggacatatagctaggttcttctctgactagctgttacttaacatatcccatttattctagcctaccttctgccacatggctggttacccgtgttcaagtaccatgtgttccgctagtcacatttctctgtctccttctctcccagaatccattcttctctcgatgtctcaccctctatttcctgcgtaagccataggccataggcttttaaattggcaggtgatgcatctatacaacacaagaagatgttttctctacagtgtagcttcttggtttccatcatttaagccaaagttttgagaaaagatggagctgttttggaactaggtccgacaaggatggggaaagaggtgtttttaaatcccaccccccctcgacccgcccaagcctctttaggtacttatggaaaaggctgttccttcctttaaaagtctttccgaccattctggctgctggacgtgccaacatttagtgctacaacttcatttacacatggcagtcagagagacgcctctggccctgtggtttcctagtgcggctgatcctgtaggctgccgtcctgattgttccacttggggattctcaccatgcttatcagtcagcaccggaaaggagcccagagatcacatagtccagccctcctgtttacatgtaataaaagcccagcccagcctcattgaccagcgtgcttgatggcagacagatggcagacagcacacctggggctgtgtgtctttaggttcgcactctaccgcattctagatgcacacattgcacggagatggcctagcggggttgttaaaaatgctggaagcaggaaggaggacacctgatgtctcgtggtctgactgcactgttcaccctttctacctgggttcctcctactaatggttttagtccaaaaacctgaacaaaagctgcctcactgcagatttcccaggcactcctgggccaagttatgtctctctattatctattccctaggaactgtggacatcctcctgttgtatttctaaggctgtgattgacacactgcccatcggcctgcctctcactcccgattggatggattaggctttctaagaacacgaacacatcctcagcttcagcctacaatgcttggctgagggcactttgtagttgccccagtgtttgatgagcgagtgccgagccagtcattttcttacagttccagcaaatatttgacctttttttaggttgtaaaaacgactcagaattgctggctcaaactgccatttttcatgctgtctcacgagagtcgattcagaacaggtgtgtcaaggtagctacacatttattaaataactagcggggtggtaaaaatggctcagcagctgctctgggcaagctctgttctgcaagtagttcatggagtcttggtcccaaatgtctgtcacggtcatcattgatctgcatgaaaacatagaacttcttgccccacccacagccaccaatctttcatcactatgctgactcccacgagagtgacctgttagacaaatccccagactcactccagttaaccttaggaaaacaaagaactgatggaacatgccttgcccatgtaagcgtttttttagacatgaacttgaaagaaaacatccaagggaagtagtaactacactctcttgcgatcgtgaccatgaggactgctggcatagttccacactgtactggggcctctttatcagattaacagaaactagagtcacctgaggagagggaacctcaaatgacaagtttcctccataagactggcctgtggacctatctttggggcattttcttgattaatgattgatgagggagaacccagacctctgtgggtagagccatgctcaggcaggtggtccctgtttatataagaaagcaatgtgaacaagccatggagagcaagccagtgagcagtgttcctccaagatttctgcatcaagctcctgccttgagtgcctttcctaacttccctcagtgatggactgtgacgtggaggagtaagccaaatgaaccctttctttttccagattcgtttcaggccatggtttatcacagcattataaagcaattaatacccacacagacacacacagacacacacacagagttcatgttttatcacagcatcaggaagtaaccagtaccgacacacaacatgtatacacacacatacacacacacacacacacacacacacacacacacacacgagtacatgttttatcacacatcaggaagtaaccaatacagacagacacacacacatacacacacacacacacatacacacatacagagtacatgttttatcacacatcaggaagtaaccaatacagacagacagacacacacacacacacagagtccatgttctatcacagcatcaggaagtaaccaatatacacacacgtgcgcgcgcgcgcacgcgcacacacacacacacacacacacacatacacatgagtccatattctatcacagcatcaggaagtaaccaatatagacatagaaacttacaatgtcttgcctcacactttttttttttttactttacaacactgcaaaaatgatatgtgctcagtaaaaactgtatttcaaggcttgaaattttttatcttttcccgggctagcagtagcattaagatgctcccagtgccccacagcagcactaggcaacagctcccacttggctacaggatcacaaaggggaactgttggtgttccacagtatgctgtgttgtccagcagtcatattttctctcctaaccatgatttgggtgggtattggcttcagtgtcttgcgcatgttaggtaagcactctgataccaaaatagatccctagcccctctgagttttcaatctttagacaggaatgagtggtcttgaacttaaaattctactgccagggtttcacaggttgctgaggatataggcatgtggcactgtgccaacctgaatgaaattttcatttacagtgttttcaaattacaaatgtatggaaaacccagtcatattagtataccgctcggatttagatcctcatgtggtttgtttgtttgtttgtttgttttcatctgtagattaattcatagtttatctgtaattgaatttgtgtttctgtcattttaaatgtcaaaataatatgccttatattttctgctgttacttgctcaatagtctccctgatgttgagtgctttggctattttaaattgttttctgtgatcctatcatatagagttcttatatccacttatgcatgagaattccacaagctatattctccaaagtgagagcattagatgtgaaagtaaaggcagttgcatagttgtcttgattgttatagtattactttcaagagacggtatcctcatctaccagctcccagcagtctgcggcatgctgggaaatgttatctctgggacctgttttaggaaagtttgtttccaaggtttttaagtgctgggaagtagttcatttccttataggatggcttattttcatataaaggataaacatgtcctctttatgttggagagttaagaaggtaagacccaactgccttgtatgattgactatgtagggacaggggacagcatcattttaggtgtgttaggaatgagaattcttgatgttatataaagaaacacaccaccaaagagaaagttatcaggtaaggcaatctctttttatagaaaggatacgtcagaacccataccagcatgagtggcccaaaaggccttggtcttttttatccccgatgtgggtggtacctgcatctcattccaacttcataatcttcacagtgcaacacagtggcttcttcttcagggaagaagaagaagactcgtccagttaactgcctttgatagaagcaacagatttctcacaggtcagacctgaagtgccagggaagatcagttgtgtggccctgaactaggacttttgggtttgtttaagaactgaagaagccaagcatagttctcagctcactgaaggctgagacaggaggatcaccagacttagtcagcaggctacatagtaagactctgtatcaagaaacaaaaaaagccaatcaacagacctagaaaggagggacattctgatttcatgatagaaagaaatgctgaggctctgctatggagagcagcaagagtctgtcctggtggacctttccctccagagggtcgtctggtattcccgcttctgaaagaccactatgtttgatggaaacagtaatatggaattccagaagtttttgggggaggaactgaaggcagaaatttctgaaacagcctgtattgtctgataaacctcagcagggaggtcagaaaaggtcagatgagggtgatgcctggttgtctaggctctccttgttatatgttggagcatcttttgggtatatgcccaggagtggtatatctgggtcctcaggtaatactatgtccaatcctctgaggaactgacagactgatttccagaatggttgtaccagcttgcaatcccaccagcaatcgaggaacgtttctgtttctccacatcctcgccagcatctgctatcaccagagttttttatcttagccattctgactggtgtgaggtggaacctcagggtcattttcatttgcatttccccgatgactaagaatgttgaacatttctttaggtgcttctcagccattcagtattcctcagttgagaattctttgtttagctctgtacccctcttttaaatatggttatttgattctctagagtctacttcttgagttcattatatatatttgatattagccctctgtcagatgtaggattggtaaagatctttccccaatctgttggttgctgttttgtcctattgacaaacactgttcttgccttacagaagctttgcaattttttgaggtctcatttgtctattgttgatcttggaccataagccattggtgttttgttcaggaagttttcccctgtacccaagaattgggctttcccccaatttctcttctattagagtcagtgtacctggttttatatggaggtccttgatccacttggacttgagctttgtacagtgagataagaatggatcaatttgcattcttctacatgctgacctatagttgatccagcaccatttgttgaaagttctgtcttttttccactggatggttttagcttctttgtcaaagatcaagtaaccataggtgtgtgggttcatttctgggtcttcaattctatcccattgatctacctgcctgtctctgtaccaataccatatagtttttattactattgctctgtagtacagcttgaggtcaaagatggtgattcccccagaagctcttttattattgagaatagttttcactatcctgtttttttttttttttttggtcagaccttcaaagaagacctaataccaatacccttcaaactattccacaaaatagaaacagaaggaacactacccaattcattctatgaagccacaattaatgcttatacctaaaccacacaaagacccaacaaagaaagagaacttaagatcaaattcccttgtgaatattgatgcaaaaatactcaataaaattcttgaaaactgaatctaagaacacatcaaaacaatcatccatcatgatcagggatgcagcaatggtgcaatatatggaaatctatcaacataatccactgtataaacaaactgaaaagccaggcagtggtggcacacgcctttaatcccagcacttaggaggcagaggcaggcaaatttctgagtttgaggccagctaggtctacagaataagttccaggacagccagggcaacacagagaaaccctgtctcgaaaaccaaataaaaaccctgaaagtaaaaatccacatgatcatctcattagatgctgcgaaatcgtttgataaaattcaacacccattcatggtaaaagtcttggaaagatcaggaattcaaagcccatacctaaacatagtaaaagcaatatatagcaaactagtagccaacatcaaactaaatggagagaaacttgaagcaatctcactaaaatcagggactagacaaggctgcacactatctccctacctcctcaatatagtactcgaagtcctagccagagcaattagacaacaaaaggaggtcaaagggatacaaattggaaaggaagaagtcaaaatatcactatttgcagatatatgatattatacttaagtgacccccaaaattccactagagaactcctaaacctgataaacaacttcaacaaagtggctggatataaacttaactcaaccaaatcagtggccttcctgtactcaaaggataaacaggctgagaacgaaaatagggaaaagacacccttcacaatggtcacaaataatataaaataccttggtgtgactcttactaagcaagcaaaatatctctatgataagaacgtcaagtctctgaagaaagaaattgaagatctcagaaaatggaaagatctcccatgatcatggattggcaggattaatatagtaaaaatggctatttgctgaaagcaatctacagattcaatgcaatccccatcaaaattccaactcaattcttcataaagttagaaaaggcaatttgcagattcatttggtattggctactgtgttaacatgagtccctgcagtgtgagcacatgctacattaatactaacgcaaggtaactttggtttgggacaatctaatctgatttttttgaactggtgatgttacaatttctgattagtatcagtttctgattaaaatcacacagagataaaacctgagttcccccaattttactctaaactaggtaatttctgcatccaacctgattttgtactgacgcttgtaacttttacctagatctttcacagcttagatacagcacctacgcttcacgtgtatttaatgtgtatggcctagtgacttttaatgtagtcagaactgctgacctgtccaacacaattttagaacattttcatctctttaaaaagaaaccctgctcagaggcatttccgttactctgtggtcccgttcacccttttcatctcgcaatctaccttctggtctgtagattttactactctgggaaattcatatggagaataatacctatgtggtcttttcatttcgtttcttccccttagaatgatgctcttggaattctcccaaatagtaccatatacatagtactagttggttcctttccctgctgagtgtgtttccttttatggcagatcactttttgtgcagccattaactgatggacatttgtgttgtttacacgtttagcatatatatcagaagatggcctagtcgaccatcagtggaaagagaggcccattggacgcgcaaactttatatgcctcagtacagggaaattccagggccaaaaagtgggagtgggagggtgggggagcgtatgggggacttttgggatagcatggaaatgtaactgaaataaatacttaattaaaaaaaagaagaagaaatcagcaaaaaaaaaaaaaagaataatgctgggggggttgtttgttggtttgttggttggttgggttttggttttgtttgttttgttttgttttgttgttgtttttcaggggttttgttgtttgttttgttttgtttgctttttgagacagggtttctctgtgtagccttggctgtcctggaactcactctgtagaccaggctggcctcaaattcagagatccacctgcctctgtctcccaagtgctgagattaaagacacacatcaccactcacaactagctgttgtggtttttgtgataataatgttctgaatgttggtgttttaagttttatgtgcatatttgttttcattttttggggaggtgtagctatcagtggggagatatatatatatatatatatatatatatatatatatatatatatatacacacacacacatatatacatatatatgtatgtatatatacacacacatatatacatacacacacatatatatacacatatatacatatatagttcagcttcctgaggaactgccagattgtttctggagagaactatactatttgtatccctaccaacaatgcatgtgtgtgcttctctgtcacctggcaacacttgtgactgacagtctagtgctctgttctggccattgtactgattgcttagaggcatactattatgatctgctatacattcctctaatgacttacagcatatagtagactgctcactcctaacgctgttttccttcactgttaaataaaggcaatgctctgggaacttaaaggcagttcatactctcctggcgctgccccatctggggacttccatgctttatcagccctagtacaagggccagcagagtatgaatgcatggcatgcagtctcttcttcctcatgctgaacactatgaggctgtcctgatcggcctgccttggcttatgtgtctacctcatggcccacatttctgcctgagcagtgcacagatgagttgaggcattttgaaagaaaatgatgcttttgtggaaagagaagtgatgaccacaggcagcaatctcctgcccatctctgtgcatcacacagaaggctgggaaccaaataattgtgccctgtacattgtcatgacggacatttatgtcttaattgggttttttgttttttgtttgtcctggaactcactctgtagaccaggctggcctaaaattcagagatccacctgcccctgcctctgggatcaaaggggtgcaccaccacctcccggcgtcttaattagttataaccccatagtacatggaagtgctctgctcacaactcagccaagaactgcgttgggattatagtgtgttgggttagtttaaattaatcacttcatggagattttttttttctattttaattctaggtattcatcgtcagaaataaggaagcagtttacgctcccacccaacctcggacagtaccatcggcacagtatcagtacatctggtttcccctctcttcagctagtaagtatgcattacaggtttggtgggtcagtggtcagggactgaagtacccagcatctacacccctcccccacaccagccttagctcctgttgcacctagcgttctctgcccactgcttcgtaactctgctagcccttagacatcagacatctccctctggcgtgtatagaatgagacagcccagaactgtggtttttattgatgtcctcaacttagggggcttgcaggctaccccaaaaccatcccaattacagttcataagtgggaagacgaggtagcctagaaactgaccatgatttttagcttatgttagttagattttttttttaattgaaaaatctcagaagcttgagatacagatcgttcttatgggataattttcttggaagtaaatttacatactatgaaatttatcaattttaggatcagggttttgtgagtatgggcaatttatgagtcacttaagctcctcccagaaagagtgtagagcgctttccctcccacccttttgcatcccctcgttcccatcccaggaggtccctgagccttgaacttgcaccagtgaaaccattcacaccagtgaaaccattcacatgggagagcaaataacagctttataacataatatcccctttcaaggtacctacagtttgacattaactaatcaactggggagtatggagggtttgttactttatttgactaataatatgtgtatcatattatttaaggactggaggccagatgtgtgtctggtgaggccaaactgtcttcaaatgagactgtttgcaacccagaagtgggtgccgcttcctctgagccagcagagcctgctctgccctcacttcctcatacaagcacaagccacagccactctctctggctgatctagtggttatcttgagaaggttaggttcttttttgtttctacttattacttcaaagccacttctgctcttcgaaattttgtaaccttcccctgtttcctgtagccgccattttgtcgcccgtgacagtttacccaccgcgttaactgtgtgtcttcaggtatgttttactggagcaatttgtggttatttcaggctagcttaatgggttgtgtcattgaggagacaggactaacagatgtgtggcaccttcactgccagaggctaccttggtgacatcttttggagagccctgtttaggactttggagtcttcaggcctcccttttttatttgtcttttcctgcctgcttcaggttaggtaaaaaaacacagtaggtgcattgtgcctgtgttctcggagtaagtaaacggagacctgttgcatataagctcggctgagtgatttctgattcagatacatttcaaaatgtgcaccattcggtggaaacgtgattggatgtgcttttcaattttaaactgtgtggggagctttgctacttgccttcaaagagtgtgaagaggagagctctctgtagcagctgctggggaatagtgtggacagtaaagaggttttcagggaggtttaacccctcatctccctggcagcctttgtgataatccgatagactagatagagttagtacatgcgaaatcctgttaagtatttgcaagtgccccctcagtacttttctgtctccttagagagactctgacaacagtgaattttgacgagtcacttcaacagctgggaagtcaaattaacaagaggcttagctgtccatgttgtcacgaacagaaggtatagaggaagccggaaggttaaaatgcttgctacaagaaccacgtctccatctgctgtccttcaatcctgatcctgtttgtatctgactgatcctcacattttcttcatcctgcttgtccgcatgtgctttccttggtcttccccttccccagatctcccttctaacttctgtgcaatcttgcctctgtttcttctcccaatgggagtcaagacgcctgctctaccttctaaaaaaatctcatgctctctttagaacaacccagtgccttggcctgttctcctgtgatgctgtgggaatgtgtgactctgcctccttggtagtcaccttctcagacaaggctcctgggagaaatcaccaacttataaggtgattttccttttccttgagatggattcctttcctaaatagtggagcacttcagtaagagtcacttctagcaaggcacgggagtatcttagacgggaaagactctcaacctaccagagcattagaaaatatcttaagtcggagactgcagtatgaaccgctagttggattatttttggctaattaaaaaataagacaatgggcattttggactatttgttttgctttaagtaacataatcgtttccataacctcatacaaatggttgtttaaacatatatatttagttgaagtccaggcatttaaaaccactcatcaagaggtcatttgccatttgcaagagtaaagagtttggggtcagatgaacctaaggtgaaaggtggttgtcacttattgtttgtataacctaagagaagtcactgatttcagccccctctcatgcaaagctgggtccatgtagaactctccagtagcgcctgtgtaaatagtgggtaatattgttgccttaggtacttggcactggagagactctgtggacattaaagataagtatcagatttttcctgctcggggaggctttgtgatctatttgggaagacaagtaatccagagggcccacactggcttcaaatgtgatggacattcagaagaaaggtccatagtgtgataggaggcaaagcttgccggaggagctgagaaacccagggagatggggcttcagccctgatgaactgttagacatgcctgacttgttcttatatttctagccaggacccctgcaggacagtgaggctggaaccagcagtgctctaacattgctgcaggatgttgctaggtccccagagtcacctaaagattcttagaggcctgggcaaattccaaatagcaggaggtatatacagcaaggtggtttctttggttgctctccatgctctgagctgtagatatgtggtaagcacagactacatgctactcctgtagataatcctcgcaaactacagctcttcatcagacatctaataaatgagtagaaggcagtgcatttgatattgtttccctgttttattcagttttgtatgtgtgtgtgtttttggttttggggggtttgttgttgttttatttatttattttttttgagataggctttctctatgtagccctggctggaacttgctctgtacttggtcgaggctgacctccaactcagaggtccacctacctctgccttccaagtgttgggactaaaggtgtgtatcaccactgcctggccagtttttgtttgtaatgctagctataaatgcctgccacgatgactgtgtgtacaaatattttcaaaatagataagctacttttttaaaaaaaaaaattcatttattttgtgtgtgcatgtgcacacaggtgctacggcgtgtcggtggaggtcagagttcagcttgcagaagcttgtcgtcttctgccacgtggattctagagactgaacttagggctcctctacctgccgagccctcgcaccagctcaataagctgcttttacaattagcatgagtgttccaggcatgatagtggatggtgcctgcctgacactcttatcagaggtccttctgaacagatgcagagagacaggcctctggccatcccatgtcctagcctgagatgcacaccagctttggcattctctactgccactgtcatgggagcaggtttaagcagagatctggtgccatccatctatgtaagcaaacaactctacacttgatgcttgtagtaaaaacaaaaacaaaaccaacctgcaaaatgcaaagcctttcctctggttgttaaaagtttaaagtatagtaagtatgtaagtgaaagggctgggatctgtctctaacgcagcaaagaggattgaagacctatgcagaggttaataactttaagtgcattatttaataaaggaaaatataactattttttttaaaaaatagaaaagtctgaagagaaaacaaagaacagcctgatcgtgacggctctgggcgaggtgaaggatgtaaaaagccacaccctgggcacgcacctgagcaccatagctacgggacctgtttatgtgtctaacaattgtggcttacagatgtctcatgcccaagaagcatttcttcttgtgcacacactggcttctgtgaaatacagcacccctttctttgccagctgagggtgacttgagcacgggctccctaactcctgacctcctttgtgccttggatgccattgttatctctcacctaatttcttcccagacttggctgtgctgttttgttgattatacggaagggacatggcagaaaatgcagcgcttggtgtagttcctatacacattcttagcgtggatgaaatagaaggtagggcaggcattctgtatgaagagcaggcacgtggttatggtcactgtacccaggggatggaaacaggccagggagatggctcagtgtggaaagtgtgtgccactcaggcatgagaacctgagtttagtccccacaaccctcataaaaagccaagtatgctggcacctacttacagttgcaacactgggaaggtggagacaggaacgttcctggggcacactggctagccagcctaatctagtagcccccatgtcccagggagagccccagcctccaaaaccaagacagatggcttccgaggaaaacctcaggttgacacatgtgtatacttgtgcgtgcgcacgtgcgtaattgacttattaagaaccagatcggtggtcatggtagcatctcagcctctactgtggcatcagtggaagatttccgttgctggaggcagggaggcaagcctcgtttaggtcacgaagtactttgaaatcactgaaggcagaggaaattttctgccttaagttttgctaagtgcagattggtgactgtctctttttattcattgaggaagtgtttattgggtcttagtctgtacctgcagctgctgtaagagctacggataacaggcatgaatgtaacaaagggtgcatcatttgttcccatggaacactttagaataggagatgggtgtaaaccaatgaatgaattggtcagccgtgatgagggcaggaagggttacaaagaatcaaacaggcagagggaacggggacacagataagatgctgttgtaggcaaggtagcctttgaggacctctgtctgcaatggagatacccaggaagtgcccagcatgagcctgacaccttgccaaaaaaaggcattccaggcaggaggaagaagcatgtctagtctgcaaggcaagagtctttggccccagaaacagccaggaagcagagagggcaacaggggagaccatagctacagcagcatcgccaattatagctgagaacacaaaatgtccattcatgcaggtaagaagaggaggttctgggagcactgggctaggctaacctgaagtccatggagctggttgttgggggtcggggggggggggaagcagagcaggctggaaccccatggcaggagtggagctgatgctttacttcctgaccacacacacactcacacacacacaacctcacacacacacactcacacacaccctcacacatacactcacacactcatacactcacacacatacacacacactcacacacatacactcacacacacacaaacacacactcacacaccctcacacacacaaacacacacacactctcacacacatacacactcacacacatacacacacactcacacacacaaacgcacatatacacacaccctcacacacacacactcacacacacaaacacacacacacaaacacatatatacacacacaccctcacacacacacactcacacacacaaacacacacacacaaacacatatatacacacacaccctcacacacacacacacacacactcacacatacaagcacacacacactctctcacacacacactctctcacacacatacacactcacacacatacacacatatacacactcacacacacacaaacaccctcacacacacacatacacacacacacacacacgaacaccctccccctgccacctaaacaaagataatcttgaaatcgctttggatcatggcatttaaactagggtcttcttgttctctgctgactaagaagacagaagagaggagaaagcagagtggtcaaggaaagacttggacccttgcaagccaaagagctgaagatccaatgtaactgctaccttacctcatgctcagacttcatccgtcatgcagtacactgaagctgtagctcttcagtacttgacaaatgtgtgcgcgtgcgcgcgcacatacttatgggtgctgtgtaagcatttatttcttcctgtttgtggtgattgcctcgtggtaaaacctgctcatgagattaaagcgatagatgctctagagaacaaattcttggctattatttgattgtttgattcctggctattatttgaacttgtaggaagataaacagtttgaaggtctatcaagttaagagaacttggaatctgcaccccattaccactggcaagacaattttctatcacactggaatgagaagactcgttaccttatcagtttctctatagaaataaggagagaggtccccaagtgccagctgatgtgttctagagaggcatggtctagccatgattccgtcctacagtttgagcttacagcctgctccacttctggactatgttcacacataaagagtttgagtttattgtctgtgcgtgtggatgtatgtttgagaaggttaaacatcattatccagtggttgaatagagggtggccccatgctctctgtatcttaataccaaattcagtagaggctcagtgagcaactgcatatgatgggtcagaccatcatctgctcctggtcttggtccatctgtcctataacagttgctgagtcttcacctttacagctagcttcaagtttcaggaacatggctgggttttattttagctagactggcctttccttcctttcctctccccccccccccagtgcttgttcattaagcataactgtgttcctcagtgcttttaaagcatatttcattacccgtgcttgaattcctcatcatatacttataatgtcattcatttattttctattacatctgagcatccaatcccctgagaagttttgaggagaatttgtgggaagttgtagatgcaatttttacctggtttgatacacacttaactattactttgtacttcagttatcttaataaatactgactctgtggaaggcatatatgcaagaaaaataatcaaaattatagtggttaagaagacagcctgactatacttgaattccaaatgtgctacttcctagctatatgatcaatggtaaattattatatcatctgaaaatggggatagttaacatgcatattccactggattctagtgagactgacttggaaaggcccatgaggactgtggtcccttcctcggctgacttcaggctatagtcagaaccaggggatactttcccatcttcttgccacctgatgatcgaagggatctctttgctctcagttcaaaccgtaacgctttcttctgcctccattgcatcctgctgacagtgagtgctatgtaagtcagccatctaaaagaatctgggccagaagtaggtagtggatttacttggggtttcttagaggagcagaactggtagaataaatatctatttatttaagggggttattaaacccccttacaggctagtctggctagtccaccaatggctgtcttttgacagaaaggacaacagtccagcagttgttcggtccacaaggctgggttctcaactggactttaatgtactttggaatcccaaagaagcaagctctaaacctgataaagggatgcctcagcagcaggagagatgagatcagagagagtgcgggcaagcaggggacaagaaaactcttccttcttccatgcccttttctgtgggctgctacccgaaggtgtgacccagatttagggtgagtcatatgacctcaaatgatctggatttataaggtagctcttcctatctccaatgagccaatcaggaaaagcctctcacgggtatgctcggctacttgagttttagttgattccagacatagtcaagttgacaactaagaattgccatcaccggcagctgtatcttctctctcaggagtaagttgttcctgtctcagggaaagggagacagtgaaagccatacatagttaaattctggcacccttttgccctttgcctcttcaacagcactattcctccaccccagcttaaggcctgctggtatgtgggctcaaggggatgaaaaaccagttttgtcagcccttccttcaggctggccctcccataggacaagtccggaatctgtggcttttgttttgtgatgctttggggattgggaacagaacagcgaacgttcacttgggctgtgtcagagggctgcagcctctactgctgttgttatttctgggccagtctccttgatctaagtggctttcactgccttaaggcagtggttcctggatctttgcatgcatcgggctagacgtattttgtttaatacgggactggcaaaatgttgcctattcttaatactatcaactgaagagcaacattgtttcagttactctgggtctctatcctgtctattccctccccctcccctcccccctctctgtgggagtatgaaacgaagatggggcagctttcctcagcagatcctcaggggttgctcgcccaggttcagtcctgtgcgtttcttcccgactagtagtgtttggaaacctcagccatagaggggtttagccacaagcctggctccaggtcagctgggactgtgtctaagctgctggctttgagcagcagtgtacagccgtctcggtccaagggaaacactgcatctgagcgcacagccagaggagtgctgcgtttgcctgagtttctggagagttgccttctttctctttttcactgtgtttgggtaaacaaaagcatagcctccgagagagagcttttgcaggagaaattataaaaattcctcaaagcctgtgatctcattttggatctcctcaggattcctcatcaggctgcaattaagccgagaaaaattctgccttggggagggattttaattactcatcgtgttgtgacttgactttctgctactgcctttctttacctctcctgtcacaattgcagtttgacagctcctccagtcgcttcatttaggctaaaagtgaaaacgctgggttgaaggggagggcagggcagatatccaccgacttgcgtgcctgtgtgtctgtctactccaccaggaagcctggtgggaacgaccctctcccctcctttcccctccagcctcagctttatgagcctgtcgagccagtggactttgaaggactcgtgatgacacacttaaacagcttggatgcagagctggcccaggagctgggggacctcaccgatgacgacctgcatgtggccttcacacccaaagaatgtaggactttgcagcactctctgccagaggaagggtaaattatttttttgaaaatatgagatgggaagggtgctgattctgaacccctgtctgtctgtctgtctgtctgtctgtctctctctctctctctctctctctctctttctttcttcttgaaacagccatgtaccctaaactgaacgcagagtcacagccctcctgctcctgcctccgtggtgcctgagttaaaggtgtgcactggcatgcccagttttgaaatactctggaaaagaagcaaactttggattggggtggcgaggactagggggaagggctacagagcagcagcaaaatgcctgtgtaacatgtgcaaggtctcagatttgatccctagaattacaaagaagttaataattattttaattaaaaaaaaaacattttagggcccgaggagatgtcatgaggacctgagctcagattccccagcacccccagaaaaagcaaggcatggtgacaggcatgtagtttaactccagtgctagagaggcagagggtatccctggggcttgctgagcagccagtttagccacttagtaagctccaggtccaactgaaagaccctccctcaaaactaaagaattgaggaaggtacccaacatctacttattgcctcctcatgcacatgcacacactcaccagcacacacacacacacacacacacacacatattttaaaaggagcaaaactactcaatccactaaaatatacagtacatatagtattgctccctagatgtagagtttgtttgcttgcttgtttgtttgtttgtttgtttgttttgtggtgctgaggacctagcacaggcctcacacatggtaggcagatgtacacgatttctaaattggtttagccaaaagctttggaaagccctgtgggagctaagatacagtttaagggatgcagtgggacagggtgggacagtccaaaaaaagtgaagattacaggccctagaattggacttctgggtgccagcttactgaccataggctagtcacatgacctcaagaagcctcatggtctctatttacagagtgtgaagagtgttcataacaagtatggaaatgcctctctcaaaagcattttatgggccaggaatagctcagcaggaaagacatttcccaggactgactcattcaagttgtcctctgattgccacatataggtgtatgtgcacatgcatgtatgcacacagacacacactctcacacacacaagcatacataagataaaggaatgtaaaagaattgttaagatcttttatttgtttctgtacgaaggcctggatcaaattagtaacttaagtttccgtgtacgtttattgaacatctgttgagttctgagattaaaagatgaggaagggaaactcccttcctctacagaagtttcatataagggagacacaacagaagcagtgtaaaatgaatattcaaataaccgtttagagctgcgttgctgagcatggcgtggacgctagtgctcgctgtccagcaaccgtagactcatgtctgaatggaatgtgagcagccagccataggatgaacacccctgcctcactggagatagtgagtgactttaattttcactcattttaaaccaaaacgctaccttgaacatttttgagtcttctcatttctcccagaaagtagagtatgagacatggtgcctgccctctttgctctgaggtgtttctgtgttaggctgtgtttcagcacaggtgttgacagctgggacatggaaagtcccattctcttcttgagtcagttttccttcacacagaaagctagccatgtgtgcagctctactccatgttacaaatactcgtttcccaaaaacctggtctctgtcattattggggaacagttttcttagtgtcagcccatttcttcaagtgtggtttgaatattgacaacacattttcatttttggtagagttacattatttatttgtctgaatatttatctttaaatgtggccagaatcttagaagaactggtatagaatacaggaagtttagaggtagaaggacttttaaaactttgataaagaaggttttcctagagccacttggtaggtgagataccattttgttgctgtgactttcagggaatgtgttacctctctgatgactttcaggcagcctgtaccatctcagttgttgccaaagtcttctgtaataagaaaggcagacagggaaagcattctggctaccatgggagtagctactagtgactctaagtaactgtcctgtgcttccctcggaagctatattgagtagtgggagttatgtgtctgggcctgcaggtcctgcaggtcctggtttggccatttggtctatgatttggattaatgtccttaacatctccttcttctgtacaacaagaagaacagcagtgtctgccttgttgaatagagacatgttaagtacatagtgatgttatctaagtcttagctagcacagagctcttaccgtgcaccagacaccctttcaagcactttgtgtgttagcatcaaatctttgccatgattctctgaaggaggtcctcttattacatcagcacttgctggtgaagaaactgagacagagaagggctggatgataggaatgcatcaggttacagagtcaatgaggaatggagctgagggttgggcagtcagggctaagagatctcctatctagcctttgcagaatttcatcttggatggataacagttccatgggtgagttccgtcctgcctccttgtgttagtcagtttccctttactgtaacaaatatccatgataaatcaactaaaaagaaggaccatttattttggctcacaattttgaagctttcagcccctggctgtttgggctgcattgctttggccatttagtggcgcagagtattgtgatgagagaccatagcaaagaagtaatttgtgaccccttcatggccaggtgcaaaagacagagaggaagacagtagtgtcccacggtccccttcaagacctttcataagaccccacatcctgaagagttaccacttctcaattatgtcatgccagagactaagactttaacaggtgagcctttggaggccatccaacatccaaattattctatccctgtttcataaatgcaaaaattaaaacttatagtaaaacatgaaaggggagaaagcccagaggtctcaaccctagacaaagaactgcaggaggctaaggaatgctgagggccagagaaataatcttctccagggaagagcacaccaatcgcttatccaataccaaatggccatcctggaaaacatacgtatacaagtaacactatatggcctgagacagttgtatttatgaacatatatatgtatactcacatatacatttataggtataacaataattaaagaaaaagaggccatgagtttgcctaagaacatgggagagttcagaggaaggaaaagggaaaataatatattataattgcaaaaatattcaaataaaaatcttttagcttttaggcatatttatgtctagtactaatatatttctaacaataccaagagctttatactgtcattatttctgattgcaagactgtggaacatatagaaaatatctctaatgatggattcctcaacaggtacgacagaaatccaacacttactaagtcttcaaagccaccaaagcccaaggcagctgttcttggctttctaaatggaaaacacacatgcccaaacaaaaatcacacaaaagcaaaagaaaataaaataactgttagaaatgactatttgaacctatttttcatgtttggtgtgtaattatagctgtttctccctaggaatgtcttaatgccttcaggcacagatgtgctttagcaattctctatatcaaaggaactcaacagagcataaaacaacaacatatttgtttaatgaaaacacaagtatcattgccttaggaatactccatacacttgaaacaagtgggcaagaacatcactaatgttcttattgacacagatttgagatggtggtgtgtcgcttgattgtggaaatgacttattttatcacttttcccagtaataacttctttttatcttatttttcacctaattagagttgaactggatcctcacgtcagagactgtgttcagacctatattcgagagtggctgattgtaaaccggaagtaagtttatcccctctttatatatataaatgctaatttttataaatgtaaattttgtattattggtatttttttcaaatgaaatggctttttggaggggttttagggttgcagacaaattgaacagaaagctttgagatctcccatattctccctctcagagcgtcactcatgctgggcacacactgggtggcattccagtcctgccattgctttttgagctatatacttgatggcctttgacaaaagtgtgacatgcttctgcccttgcagcatcaaatgaaagggttttgctgccgtgagagtcccgacgctccacctgtctctgctccagccctcactggtctgtaccagtcttcttcatggtcttgggcttcagcttgcttcatcttgtccccttgtggcttcatcccttgttttctatcatcactgaaaaaaaaaatcttgcgttgtacagatgtactgcagtctgtttatctcctcagttgggaagaaaaatcacattctaaacatgaagagtagagcctttttagaagttataaatagatagagttagccaggcacggaagaacatacctacagttacaactactcaagaagccgaggcaggaggatatactttggacctaaaatttcaaagccagcctgagcagcaggacaagacgatgtctcataaaaacaaacaaactgactttctgtttttttttttttattaatcttcattttttattttgatcaactcctagagacaagatagttgatgaattgaaacttggcctcaggttcaaagatgccgttggaatttgtgacccccaaaacaaagtacttgctagtcttccatggagagcatttttatctctgggttaatcaaacattttgtggcatttttttcagaaggttctgtctgtctccatggtaacgaccttcacagcacagtctcacgagacgcatatgaacacacagaaatccacgccctgtgtccacacacagaaatccacgccctgtgtccatgtgcacatatatgtggatgtgtgtgctgggaagtaggctgcaggtgtctacagattgaggctcaccacactagatagatgccagcctctggaacataagcagcttgcggaaggtagcctccccctctcccgacactagtcggaattactgttctcagggatagataataagactcttttgggttttatccagttcctgtaagtgtgccattgaatctgtgctggattattttttctttttagtaaagaaaagtatgcatcctgtttccagtaacctcagaggaaagagactcactcctagaaggtagtgatgacaaagctgcatgccagtccgtggtcccttagaacgcaggtggaaagcaaagttcgccagccaggcaaataagattaagccatgcttctgataaatgagagacttcagaacaagttattttcagactccaaaatgttatcatcagaggcacttttctgggtatttaaagttctaaaaaagaaatccaagaaggaacaataaacagaaaggtccattggactaaatttggtcttcagatttattttctatttgaaaccctgagcctgcccctcctcccaccagcacagactctcggaatgcttttctgtcttctgcaaattttattaaaaaaaaaaaaaaagactttagaatgctcctggtagaaatttagaaactatagaaagacaaaaccaaaatgaatggatttcattctttgtagataaccatacttgacagtgatataccagcattgaatcaaatctctttgttgtgtatgtttatataaatactacatcaaactctagtactattttttagcctgaattttcaaagtaagggaagattccctgtctatatttttaattattcttcctcaacacagtaagtaatgattgcttgatgtatgtgtgtcacatgtttaagcaaatcttattttttttttttttgcttttgtacttatgttttgtacagtgtagcaatgtccttctccctaaagccctgtgcacatttattgttttttccctatggggaaaaactataatttctgtacctaagatatatgcacaaatttaagacttaataatagaccagagatgtaatcaatatatgaattaaatgttgaatattagcaaatataaaatactttattttgtgaaagaattgtgaaaggtttttgacattttctttgtttatctgattgaacaatatttcctcatatatttgatggccacgagtaattttttccttagtgtgtactacttaagaaatttgaacaactctattgagctatttggttttgtaaaaccttagataacttttttttttcctttttggggcaatgatgatgcattcctataatcccagtacttgggaggtagggacagatggatctctgagttcagggccagccttgtctactatgtgactttcaggacagccagggctacacaaagaaaccctattccaaaagccaaaaccaaaaccagaacacaaactttttttccttttaatggtatgttttgtgtgtgtgtgtgtgtatgtgtgtgtgtgtgattgtgtgtgtatgtgtgtgtatatgtgtgtgtctgtgtgtgtgtgtatgtgtctgtgtgtgtgtgtatgtgtgtgtctgtgtgtgtatgtgtatgtgtgtgtgtatgtgtgtgtgtatgtgtgtgtgtgtgtgattgtgtatgcacatacgtgaagatgcacaaggttggtgtttgaaatcttccttaattatttgttcatcttatacattgaagcagagtccctcagtcaaacccagggtttacaaatatggccagtgtcactagcttgcttaagggatcccctgtcctcaccttctgagacttctaggtggattctgggaatctcagctctgatcttcttgccttcacagcaaatgctctaattgctgtgtaatctccccagcacctttcaccatataagttccttaccaggtagagcttagatattgtttatattttagcatttgggatgatttatgtaattaaatccatatttgtattttccttaaggtttttatctttggtgtcatgtttaaatgtatggtttggggcttgacctttagccaactcgagtgttgtttctgttccgatgcgtgtcccatttctttttcagaagcagtgattatccatgcagttatctcttataaaaacaatatctgtttctattctgtcaagcagactggggacggagattagcgttggctgacttctcagcgcactcatgtcctggatgcgtttccttccccacacaagctagtgggcagagataaggctccaactctgacactcattggcagtttctgacagtctttgactggtgtcttatagaagggcaatttttctacccctacatttgattctacgatactatgaatctgaaatactaagtatgaaaattacaatttctatactcaacttcttccaacacacacttctcccaggagtcgttcattcgctgtgtgtacccataatgctttattcgtggggaaaatccaggcacccttcatcactcgtcacctactatgttttcaatacagcatttaaaacaatgtatttttaatttattctttggtaatatatagtcaaacatatatacaatgtaacttgatcatatttataccttattcccctggacacctcccccagctaaggaaaccccttccaacgtttattcctttctttttcttttgcgctaattaccactcagtccattcggtgctaatggtgtgcacatggatgcaggtgaatccaccagggtatgggcaatgtattagccacatcgtccctaagaaaaaggattctctttcccagcagccatcagctacagtagttcttaactaagagtagggcttcatgagccccttcctgtccgtagcaccgagaggtggctcagcagtgaggagtgcctgtgctcttcagaggacttgtgtttggttcccagcatctgttaggcatgtcatggccactgtgggctttctccagtccactttggcatgcctactgatgtcattgccggctcgttttaggcagtcatgttggtgagactttatggggggggggtagctctgacgttactaagagatcaaattttataacaaattccctgatcctctggcttttacagtcttttcatgctccttttgaagtgttctctgagcattaggcatgggagttgttttgtagatatatccattggaactggacttcacaactctgttttgattggttgtggttcgtctccatcatccccatggtctccacctgtagtcctcatgtctcaccaatgtctctttttgtaagttataagtatgcatcatggttttcaataatatctttgagatcatcttgtttcagagaactaggccattttttttttaaagaccgccttgatttcctcagaggacaggaaggtcccatgagttatggttctttctctgttgatgaatatgtaattgtctcctcttcccataatgaaaaattctagaacatttgctctacccatgactgactatttctgaaggtagaaaagagacccatgcatctaatatgttctgattacttctaccattcatatatttggatcttattcctgtagtccaaaagcccaactatatatacatatttatgtaaatgtaaaatatctatatatacacattatcccagtacataccatgaagtcccatctctagggatttgactaaacgaagcaaaaacatatgttcacataaaagtatgcaaatacttgtaacatttttatttgtaggtgccaacattataaataacaccgaatgtattcaatagggtaatgagaaaacaaagtctgctaaatgcagacaatgataccactcagcaagatgatgggatatttaaacaactgcacagacaacactagattcattatgctaagtaaagtaagccagccagtaagtagttctacttatatgacattctaagagaatgtgaagacactccagttactgtatcaaggaaataaccctcagaccacaccatatagttttctaagcttcggggatgggcggcagcctgctttctgcagaggtctgatcttagtgaagccattttgccttccatgaacatctttgtcatttaaaaccatgcagtcaagcactggttccgtcagctcctttatccctcaattatctccgggctgctattacacctctctgtaaaatctagagatagtttttttatgcccttgttctctccagtaatggctttgaattccacttaatgggcagaggtgcatgataatggccactcctccccctctcattctgtgggcatttgccactcaagtcctgttgttggcacgtttaaatcagatagatggtgctgctgtaaaggacaaaagagaggtctggccttatttttatcactcaaaagggaaagaatgaattatgtaaaatgcatggtctctttttgtagaaatatattcacctttttctggttttctacacatgtgcacgtgcatgtgtgtgtgtgtgtgtgtgtgtgtgtgtgtgtgtgtatttgtgtgtctgtgtgtgtgcatttgtgtgcatacacatatatggaagtcagtctgaggaacttgcaggaagaagccctttccttccatcatgtgggccccgggcattgaactcaggaggtcgggcttagcagcaagcacctttacctactgacctatctcacaaacccagagaatatatgcttttcctagaactatttacctgtgattcttagacttgcaaggcctccttggatagagctctttctatgtttcgtgcctaaactgccatgtttatgtgaagataacagttcttcagccctttgtgttttgtgtgctttgatacaaggcacagaagggatgattcatgtggggctgtgttcacttcttatcctgttctcatgtgccttcatcattttgtgccaatttatgcttgatagcatcctttggggggggatagtagggattttaagcgcaatttcccctgtcgttttctctaaatgaagccggggtgattaacttcagagtgttttcacgacttggtggtgagtcaaactctccagtgattaaatgtgtttacgtgctgtttatttttggtgcattatccatagcgacagtgaaacatttcatgggtgttatgggcagcatcataaaagtccctggactttatctttcatccccagtgattaaggtgatgctgcaggaaggtcacgcacaaggagagtgggtacctcaaggagcagggcatcatctgttttatcactccacttttactcccagtgaactgataaacaattaaaaattgaacacctcagtgcctataattcagttactcccaaaacaccataaaaatgtctccccgatcaataattgcttattatgacacacatttgttgtgccagctgtcaaggtgctctgctttcttaaagcatggagagcaagccaggctcatcagcctacatggttactaacaagcagtaacctggcaggggacaccatcacagcctgctctagacctcctcggcagaggccctggtcaaaggcttcttctaccaagccttcgctggggtggccagaagctgtcacacacagccttctgtgagtttttaaaacgtcttgttgatatttccctggaagcttttgtgtcagtgtgcattaagttctggttacctgtgtcctccctggtcattgtggcatcttttatggtagactgacttcattggtgccaggtgctctcaactgtatgtattctccttggtaccttattcccaagagaattaaagttataaacatttgacgaatgaaaagaatgaatgaaacttaacaagcaagtatccacctagcagtacatgtaggacggacgaggatctcattaaaacctggagcggcagggtgccatgagtttaatcaggacaacagactcattcagggctttgtagcatcctacaagtggaatgctaaaatgggttctttgcagagctctacccctgtttctgacagctaaattacagatcccctcccaaaacaatgtcattctgcagaaatactaggagccttcaatgtgtttgtgaagtaagtgtctggacgtagagagcattcatcggcctagcagtgttgtcacggatgctcacgatgacagctggcgtgtaactgtcaccattagcagaaccctaaaagcagaagctagggcagggattcagacatctgtggttttcaagagttgggtcttcagaaaaagtctggggtggagtctgctgaggatgggggtggatctcagatcatatttagccttgggctgcatcagtgttgcgaagaggaacgcgactgtaaagttattgtgccatcctactgtgaagtacgggaccattgtcttccaatgccaatctttataaccaccatggagccaaagttataggttggcatgggggacaggaaggtaagatgagttgacaattgctaagctcacagcagctggagaacgtgtatgagttggtaaaggggacttgattggggtccctgtagtttcaaccacagtgccacgtgtctgacacactgctttccttgtatttggagacaacctcaaatttgtagaaaaattgtacatatagaacaaagaccccttcctcctcaccactaatcatgtgagactaggttccctacctgatatccccatcaccctgcctacattggtgtgtaattgttacaaacaagtacatttgccattgtatagttgccatataacccccacattctgcaaataaatattaatttttcaataccactaatcttcagacttcatttttcatcaaatggccaaagaatgttccttcaaggatccagttctgagttgcacagtgtgtttaagtaccccatgcccttagccttgctcacatgagaagacactctcagtatatagttatatttctctgccttatgaaattatgggccagctattttatagaatggtgctccctttgggtttaattgtcacgatatatccctttccttatcaaaccttcagtttctttctttcaatatggatctataattttccactttattgaatgatttcactcatgtctgatgcatatttcaatgatcaaactatcttcagtctgactggagccatgctctttgactgacccctatgtcttgtttacatggccctagcagtcattgatggcattcttcctccctgacacaaaaatttccagaaactcttagatttccccatcttcctcctggagttagccgtggctctcagaggctgccatggtttggtgggctgtggtactcagcagccaagctgtatgtattaagtgtgctcatttttactaaggttttcctcctcacgccctttcagtgaagagagtggaaaccatgagttcttgctggcatggacatctgacttcacagtgttggttttagcattctccctttgatattttaattcctttgcttggcaaaatatggctcccgtgtccttcatgttcctactaagttgtctaatcctcctctgtgtacccattacccagattctcttccaccccagtcatcctcctcctcctcctattctggttctgacactggccttgtcacccctacccagatgagcctcttcttgcactgacacagtaccaggatgcccaagcctgatacctcctgtcagatgtcccttcttataaatgcttctttattagactcgggctcagtgatgggcgtgctcctggctgtccatgctcagatatcttccttgcactatttagactccaattcacccctctgtgagggtagcactttcataataaatgctttctgtaccctatcctgagttcgagttccagttctggatttcccaggctactctccacctccaagacagatggctgccttcttccaatgtatcttaaggttttaacacctagttttatagggagagtaggaaagaaaggagagagagtgtttgagaagtgggaaggaaagggagacggggagtgaagggacgggagagaagagaaggacacaattattctctgatcctcacaataaactcttaaatgaacttcagttgtccccttttctatatccaaggaaactagctcagcgacgtgaggccacctgcccagatcagcatctgagatcaggcccttctcactcagccagattctacctgctacacactctggcctctaaagagaaggctttcaagaaatctttgggtttggggcgtttctgagtgtgtaagaaaggtgtttaagacagagtttggcaagcgatggctgtattcattctgtgtggacagttgctctcccagtctgcctatttccccatcttcctgtgtcttcacacgggctcaatgggaacttggctttgtttgagtcggttgccagggtgggacgactaggctgagatgcctgtagccagaggctctgagccagcggtctcactacctacccagtggtggctccttccatgctggcacttctggaatgagtcacctcagtgcttgccagctcctgcctctccccagccagcattacccctgcttccaagaagagcactgtgactttctgagattttaagatggggaagtggatgctgaagggtatgaggaaggagagaaacgtttgtctgactccaacctgaacacaatggtcttactgctttccaaagtacaagtcccaaaggctaaagtgtgtgtgtgtgtgtgtgtgtgtgtgtgtgtgtgtgtgtgtgtgtgtttgcttataagtagacactcttagagatcgatgtagtttataagatgggggaaaaaggcaagctaacagagtgcagttctggttgctaagacagcaacaccatgtaggtcttttggctgcttctccagttttgttttgtttgttggttggtttgtttgtttctctataaatccaatctctccttgagaaggagcttataatactgaacctgtttttgaattcagttctctttagagggaatgggtcctaaaaagtaactgcagacaccatcgtggggagttagaatggattcagagggactgctgtgagtatctagtcttttttttttttttttctgctccacatagggcattacagagctaataaccacaggcctagtgtgttctcatttgggtctaattgcaagacaacatttcttatttaacctatatttgccactactttagtttaattatttcctcttgccaggatattagaccactcacagtgtggccaagtagacaaggtacaggactacatcacccgcagctcttttcatcttttctgttatttatttgtgagtagtgtggctgtttgggaactggtcacagggtgtggcagaggctacaaaacaacctgcgggagtgaattctctctttcctgtatttgggttccagggatcagactcaagccgtaagtcttggtggcaagcaccatttcctgttgagccaccttgctacccacccagggtgttttcttcctttatgcaccaaggactgccatcccctccatgtggctccctagacttgctggtggagaataactttcaagaagttggcagacttaaggacaggtcttttcccaaagagctctgttaaaagacagtacattttataaaataaatgttggttagttatcattgactcttcatttacaaactcagaacaactgaaactaaaaatacacacacacatacacacacacacacacacacctttcatttttgttttcagatatttaggaatgccaaatcagaaattattatggtcatttttcttgattttctcctaagtattcatatttgtttatggtcactctcttcttttttagttcctaattcagcttgctttttgcccagccttattagattggattgggcacacaaatggccaagggacactgaaggcaaccagtcatagtaacccaggcttagaatagttgccaggttgctcttgtagaaagcttcaagactttttgtcactttttctcaaaaactttttttttttttttttttgtcttctgagcaccataaaatcaagagaagtcctggcctccctgctaaagcactggggcatctcctccctccttaactaatacagtgaactaccacacctaacacagtgaactactatacctaacacagtgaactactatacctagtacaatgaactgccatacctaacacagtgaactactatacctaacacagtgaaccttcagtacctgctgtgtgtacctctcttcctgcagtgcccatccctttcagagccttacaaagggtgtttgaatccttgctagcttcctacaggtctgtctttacctgtaggctatttgacctgcctaataaattctaacctcactgcatgcccctttaccagcctgcactgtggtctttacagtaaaaacagaaagcatgggctggagagatggctcagccattacaagcaatatctgctcttgcagaggtcctgagtttaattcccagcaaccacatggtggctcatgaccatctataatgtgatctgatgctctcttctggcatgcaggtgttcatgcagatagagcactcatatacataaagcaaaataaataaaagtctttaaaaaaaataaagcacacaaattaggtgtgaatatacgttttccaagaagcctttcagtcagaaaaataggcaatgtatgtgttggtttccatagctctaaaatgacaaattagagctcctgctttttctattatggtcttacttctccagtaaatgtcttggccattctattttagactcttcccggagagagagtggtggaggagacaggtagacagacagagacagagagatagacaggaaggagaaaaggaagggagggagggagggagggagggagggagggagggagggagggagggagaagagagggagggagggagaatgggaacacacaccagtgaatctaggccctcgtgcatgctgggcaagagcctgaccactgaccctgacctatattcccatcctgtagacagcattctcctgaagcatccagagtgggtctgtgagtgttagcaacgaatgtcggtgcatacattatttttgtatattttttccttcgcggtgtccggcttttcttactcattattaagaacattgatgtggagttgaaatggcttcctctatttttatcttgaaacattctctgtttgctgcttctgcacactgctaggtttatttcagcctcttacactgcagtcacagttcaacttcagcttggagccaagtgcctcacagctgaagtgaccacacctctaccaatggcattttcccaggcgtccctgcctttcataatgggccagccaggaggccagttcctatgtggctacaacagagccttgtgtgagggctgggtgcggcattcgatggaagcctcacaagccatcctctgtggagcctccgccgctgcttccccccttgtgtcgttactttatttttaatctaatgcgttgcctctttctccctctctcctgctccccgtctccctccaaatcaaatcatgccaacactgaaagaaaccaaggaagttcagagttttgcagctttaaaaagacgggatctcgcagagattttcagaagacgcttcagaaacagacgtttgagtcagaaaccttggagtgcagtgaaccggacactcaggtacttcctgtcaacaaacacggttaccaggtgacagatggctctgcccaaggcgtgctgtcaggttcttaaaaactagaataaaagtcttcaagaaggaggaactctaccattgagtcagtggctgttttccccaaactggtttgtagctagctgcagaaaccaggattcaaatagaaaccccaaagcacagtgattaaaatggaaaaagtgaaggggctgtagctggggaagagaccgacagtgggccccgccctgttagagccaggatgagtcaaagccttcatcttcagagtgccaggcctttcttagtgatccctcggctccatcattaacctctctgggttttagttttcttccctggaaaacactaagtgttttcccaaggatgacactaagtatctcatgagatgacatgagtatggagtgagtgagtcagaatgtgtaaagataataaatgcctagtgtccaataaatcctagctactatgactgctgttcccactattttcataaggtggtgatagtcgattaagtccatgctgcatatacccatgtccatagaaacattactcccagtagccaaaagatggaagcaatcaagtgtccattgtggaagaatggggcatcaagcgtggttgccgggcgactggggaggaatggggagttactgtttagtgcagagtttcagttttacaagatgtaaagaatcatatggaaagaaaggatggttgctctatagaatgatagtacttaaccctaccaaaagatggctgagatgatgtattttaggctgcgtgtattttagaacagaaatgtagaagagctagcaatgatgcactgttttttaagttggtgtgctcatccctcaggccggtgttgtaggtgagaaaacagagaaaacagaggtggatgagtttccgttgcacctagaagctgttgccgagctggtgtggtttttctttgatgcttgctcccatagccattagtaaaaccctgtgataggtgtatcccaatcccgtatgtctgtatttgtaaacctagcactcagccttagagtgtatatacatttttttgaaggcgccttagagttattttctagtctcgaaactcaagctctgaagctgattagaaaaatgtccctccgtccattcgaagtccaggctcttatgtgctgtgccttgtcctagctgtttgctccagcctgagacatgaacacggttcctaagaaacttggcttcagccaatgactgataggaacacagtgatgttttcaagtcactgctcaggactggcttacctaaccggtgaggaatgacctgcttccaggagagaaagtacatcgcacttcaggatagtcccaccagaaagccaaacacagttttgtcaagccttcagtttgttaaaacaagtaaacaaacaaacaaacaaaaattccttgagactggagctgctgtagatccctgctggaacagccttgagacatccctgagtctagttctcattgacaaatgagaatcttgaccctcatatagaccgattgttttctctaacagacaggaccccgtcatcccttaaacgtgctgtgtgacgtgtctgggaagggccccctcacttcttgtgacttcgacctccgcagcctgcagcctgatgagcggctggaaaacctgctccagcttgtgagcgctgaggactttgagaaggagaaggaggaggcccgcaagaccaatcggccggctgagctctttgccctctatccgcccgtggatgaggtgagtgagagtttccataggggaggatattggtgacaacagggaatccaagtattgttctgctctctgacactgtagaacagcgtgaatatctggatgcttacttcgtggctcttttcacttaagcacacttgtattattggagagccccttatttatcatcataccaatgggatttctatagcaataactagctagaattttcatagtattttaatttcctgaacatttcaagggtctgcatacagtatatcattcagagccaaccgtccagttacttaggggtgtgtttcacaactaatccaacaggaacacactgttacttaaagcttggtgttattaagtgctttgttaagatgtttcccccgtggccctaatgagcaagtagagacacttgctttgaatacgctctgggcagagataatcacagccatgctcctagtgtgtgaagctttcgaatccagttttcccacctcttcatttactgaagttggcccagagcagtttagatgttgcttgcggttgcttgctggagcactttggatggcctgagaggctgtcatctttcaagccttctgtgctttgactccttgtgtgctgtgtgctcttttcagcctttccctttgtctgtcaggatccctacactcccgggtctcaccaagacagcagctgtcctgtctctgctgctcacgttttatataaagttcagttgcaagaaccaagagctggaggctagagagatgatggctcagtggacaagagtccttagcaggcaaacctggagacctgagttggatccctagattcgcataaaagtgatgggagagatctggttccacagaatggttcgttcacctccacatccccactgaggcacacgcctgcccaggtgtcctcataaaaacatgcatggacaaatgataaaaatgaataggatttgggggatttttttttgagtgaaagataaatggtacctgtctatagatgtaaatctttgaagtttggtccctggaccaagcaagacatcagaaagcctgagcctgctctgctgaggctgctgctcctgggagctctcagctccccactcctccccacccaactccctttgattttcttcccattgacctgaaaggaaaccacaccaagcagcaggaaggagatgcagcatcaagtccatggtggcactgtcatccagtaccaccccagtccctcaagccctcagcgtcccttgcctggagtcacacttctgatgaccagggagcagggcagcttgcttttaccacccccacccccaccccagtcacttctcttttatctttattttccaatcctcttagtttctgagctctttgtcttagttgcagttttgtctgaagcagattaaaggtaaatatgttgggaccggaacgatggagcacactgatgatcagagttcagtccccagagaccaacacccaaaggttgttctctgtcctcccccacctcctgcccccagcacaaacaaacagataaataaatggaaaagtgaaagagtaagctgacacattgaaaaatagattgttcctcattaaataaatcactaagtgccttggggggctggggagaccgttcagtgggtaaagtgttggttgcataggtgtaaggaccccagcacctacatgactctgcacactgtggcgcatgtctatacccctggccctgggcacagagacaaatggagcctggggtcactgccgatctaaccgaaatggttcagtgaaagagtatacacacacacatacatacatacacacacacatacacacacacacatacacatacatacacacacatacacacacatatacacacacatacacacacacatatacacacacacatacatacatacacacacacacacacacacacacacacacacacacaggggggcatttcataaagagaaagtaaagaggaggtgactaaaacttgtgggtggtcagataggaagagagattgatcaaaacaaagaaagtttctgttaaactggaaccctggattttactgtatggtaagcactattagtgatatggtagtatacatttttaaattgttaatcagagtaaagttaactttcttaccaccaaacaaaatgataaactggcaaggtaatgcataagactcttctgctgccggctggtgatacacacacctttactcccagcacttgggaggcagaggcaggcgatctctatgagttcgaggccagcctggtctaaagatggacagccaggcttacacagggaaaccctgtcttgaaaaccaaacaacaaccaaacaaaaatgtttctacaaagaacacatatgacatcacattttatcccataaatataattttattatcaattttaaatatttattttaaagctaattaggaagaatttgagcaatattatcatcaccatagtttgtttgaactagggtctaagaatggaagtgtttaagcaatttctccaagattcagcagatgaactaaattagaaagcagaggccttaaccaatctgagtgcttgcttatatgcctgcatacaacaaccgggtggtagcacacactgttgaaacacagacgtgttttaaaagtcagttcttctaatgtttcaagtttattcacattaagactttaaaaaatcagatttgtcaagaaatattggagctaacagatttgacctttacttccttgctttctgcccatctccatgatggagatgctcgcttggttgtaacacaagacactagagtggccatcccgtgagagaagaaaatgcaggaggggacaggaggatgactcaaatgtttaccgtcaagagtctccctgcaccaagtgggaggatgtccagtccaactggatccaagaatgaaccatcaactgtgtgtggagctttgttttatggcttatgagacagtgcagaaattcagatgggggctggaagttatcttacctgaggtcccagtggctgcttttattgagtggagaggaatgcggtgtaattagcataccaagccacttgtaaactagaatgtgtaaaatgcttgagagcctctacaccaccctttaatattttgaagtcattctcaaagaaacagtgtttgtgctggtcacttgaacttttgccgagacagtcctatggcccagaggtgaattctgcctcctctaaaagaattataaatgttgatatttttaatgacatgagatatttatgttacactattttatttcctagtagagaacattagaagggcaaactctttcactgaaaatttaagagtctgtagaaaaggtcaaaggatttagctaccaagttttcaccatgtaagcccttgcctaattcagacccatcctttgataggcatcctctgtgttaaagatggccttcttccaccccacatcaccgagtagcctattggtagtccatttggttacaagtgatggaacccaactaaaaaagactttaaacagaggaggagggtactcactggacctcataacaaaatcacaggagtcagacgtggagttggccactagatgcacaggatcagcaaatggaggactaccatgctgtctttctctccccacctcaccccaccctctcttctcttaacacaaacacacagacacaggcaaacacacacaaacacgtagcacacatatacccatccatacacataaacacacacacaggcaaacacatatgcacatacatgaacacacacccacccaggatgatgaaaaccccaggaatccactaaagcgtcctatttcctccttctgctacttgggaattgtctccgatttctgatacacgtgaagcctcaataaattcagaaataagaagcttaggaatcctgacttagcaaactgataccaaatattttgtgacagtaaaacttagacttatttttttaggtcaataatgttactactgatgtttttaaaagttcccatgtgtactgtaatagtttcatatccccatactgatgtgtgggaacttgcttcccagtatttaataatccagtattaaatgtgaggaactggcaagggagcatataggcaaaaccaggcagcccaagctggaattgttggagccgagggagcaaaaatggtggctccttttactagtgtatctacctctctgtgtttaaattttcctcaacgaatgattatttaaaaagaatattttaaaagttctagttcaaaccaaagctactattagaaatactaagtgtaatgttttctccagagagtgggtcttccctgcagaggtatctgctctggtcatgctgacagtcccagcttcctctgcaggtacccagctcacctcggctgaggggaagtcagtagttacactcaatgggagctggagggagggggtggggtggagtgggggtgagtttaccacttgggtcatcccaccaaacggaatacagacttaccctgaggtgacaactgctactgggaaagggcactgctgagctgtactggggtgagagaaccctgaccgtttattgcctaggaaaagagagctagacaatgacccagtgttttggcttcctgtgagcatttagcacagtagggttggacagcctactgtgggggtgtgaattaaagcttttatttttttattagttattttcctcatttacatttccaatgctatcccaaaagtcccccataccccctcccccactctcctacccacccactcccactttttggccatggcattcccctgtactggggcatataaagtttgcaagtccaatgggcctctctttccagtgatggccgactaggccatcttttgatacatatgcagctagagtcaagagctccggggtactggttagttcataatgttgttccacctatagggttgcagatccctttagctccttgggtattttctctagctcttccattgggggccctgtgatccatccaatagctgactgtgagcatccacttctgtgtttgctaggccctggcgtagtctcacaagagacgaattaaagcttttaaagatgaacattacttgtcttggcataataggaacacagttaagataccatggtccacggtgcagagtgtaaagttgggatagaccttgatggttggtagctcttgttactactcagttgtcttacacctagactgtcagcatatgttagctgtgtatgtgtatataagttataattcaactttaagcctctagcacctatttaagataaaaaaacaaagacaaggctctatttataaggatcgatagttattttgactcatatttcaagtctgaaacttagcacatttacttattaaaactcttgacaagaggctagtgggatggctcagaggttaaaggtgctcctcaccagacccaatgacctgaattgatcactggagaccacatagtggaagaagagacccaactcctgaaaatttcctctcatatctacatacaaaccatggtgtgtgtgtgtgtgtgtgtgtgtgtgtgtgtgtgtgtgtgtgccaaacataatatacaagcaaacaagcacctcccccaccacacacagtaaatataaataaaatatgtacattaaaaatttggaaagagaagtgggttttgaatgtgtatttagagcttcagagtagggagaaagactaggcacaaagttttgcaatgctgtctggtagatgtcactaggccatagctatgtttgcatttccttccttccttccttccttccttccttccttccttccttccttccttccttccttcctccctccctccctccctccctccctccctccctccctccctccctctttcccttccccttccttccttccttccttccttccttccttccttccttccttccttccttccttccttctttccttccttcctaacatcttccctccattcctcctttcccctctttctccctcagtttctttctcctaaatgttccttttccgaggggagaaaatgtttgctttcgtgctggcttgaaatgttggcaggtggatggcaaactctcttctcaagacagagcattgctctgcagctggaaataaagcagggacacggagggcatcccttcctcccctggcttaactccgactacaaggccctagggaaagttgctgacttctttacgatgtgattatcaacaggaggatgctgtggaaatacgtccagtacctgaatgtcctaaggaacatctgggcaacagaatattggtcaaggtgctgactctgaagtaagtgtcagactcacagccactgtactaacgtccaccttgtgtttagatgaaagctatgtggcatcatcaatgctggggtcgagagggttctcccagcatcttttcaatagaggggagcattggggtaacagaaagagcagagattcagttgattccctggactctgtttctccaaagcctttaacaaccagacttctataacatggaaatcaaacaccccgtgtctaggacagttaagtgtataaggtaatgacgaactttctaacattaagaaaaacaacagtaggttggatatgtaactaggtggtagaatagttgcctggcatgtgtgaattgagacccatagattgacccttgtcttagattgggttactactgctgttatgaaacgccatcaccaaaagcaagttgggaaggaaagggcttattccccttaggcttccacacccatcacggaatgaaatcagcacagcaactcaaagagggcaggaccctggaggcaggagctgatgcagaggccatagaggggtgccgcttactggcttgctccccgtgctttgcctgacctgctttgttatagaaaccaggaccacaagcccagggctggcactacccacagtgtgctaagcccttccccaatcaaacactagttaagaaaatgctctgatcttatggaggcattttctcagttggtgctccatcctttcagatgactctagcctgttgtctcccctggttctgcccttcaatacgtgctaataccactactcatgcagggaccagtgctggctctgttgtgtcctttttcagtctagccagttccttgggatgggtgtcaggaattgcatatgttgagataaccagcctataaaccagatttgtcttcagtaatgggcacagaaaggcaaagcctagtccttgcaagttaaaaatcagcaggaggactggctgagagaggttgttcccggtgttcagaaagtctgtactactgtctgccacgcctagccccattcagttgggctactgtcagatgcagtttagatttggaactaagagaacattctccccgggctaattgttacaagccttccagatttatctaacacataaagccacggcagctgttcttataaaccggaaacacgtcctgccgagctagagatgaattataaaacaaaacaaaacaaaacatggagtctggactttttcattaacactcataattttcccattcatatctgtgtgtgtctcctatttgtggtgttatccttgtgtttctggaatcatgttcacatttttaatgatttgtataaatccatgcacttttcagacattcagacatagacaggctagaaccatattgattttctccatccctccctccctccccgtctctgacaggtttgagattgaaattgaacctctgtttgccagtattgccctctatgacgttaaagaaaggaaaaaggtatgtttaaaaaaacaacagcccatcctataaatcccatatgattttagagttcacgtttccaacctcatttctggctgtaagaaagcacaacaggtgttgtgtgtgttgtgtgtgtgtgtgtgtgtgtgtgtacaggttgtgctgcatgggtgagtgtgtatatgtatttacaggtatgtgcacatatgcatgtgtatgtgtgtggaggcccaaagttgaatcgtgtttttcttagcccatttgcacgttacctgtgcaggcaggctcatccggttggacccagagcttccgggctgggcttgctccaggggttcccaggctctgcctttcagacgctgcatttacagccggcctctgtccatccggcatttgtgtgcattcctgggattcgaactcagacacccaggcgtgtgtgtcagttgcaccccgctgagccccagcatagacatcaaactggaaaacatattaaccctgatagctccagattttcttccttggccatgtttgaagaaagctgatgtggcaatgcatcatctgtgttctctgaagaatctttaagggaaaggccagctggaggctcactggttggatagagaaagaaataagtaatacttgaggctatgtagggtgtaaaataatgttgtcattttaacaggtcagcaatgcgtgatttttgtccagaagtttgttgttgttgttgttttgagtgttttgctttttgccgtgagatagattcattgtggggctggggagatgattcggtgggtaagagctcttgccaggcaagcatgagggcctgaatctgaacccctaacaccgacataaaaagcctggcatgattgcatgtttctaaatgctggagatatgttgtcttaagacaataaaacagaaagcaatagaagtagacatccaccatcctgctcttactcctgcatgtaacacacacacacacagagacagagagacagagagagacagagacagagagacagagaggaaattaaatagcttcattgtgaatggatctagtgacatcttgttagtgacatagtcattacatagtaagaggtccgtgtcttttttccttaatagttcaaggtggtaaggggtgaatggcaggttagtagggtctctataccagtcagtcattcagaagtccaggctgccaagagtccgtccttccttaatatgtcctctccccaggcactccgcttagggccattggtgcttgcaatatgaaatatgtgagatggtgaagtggaggaggcctggagatgtaatgtctcacttatgctccccattcactgcagacgagttagtcacgtgattgctctaactgtccatgtgctgacaataaactacctcagcatgtagctttcactaacccactcttagcaaggacagaaagaacccagtaatggctgccacctcaccctaaattagaaagccggagagcgctgggcatgtcaggatgaggatgcattgcctgtaccaacctcctcctcccacgagtaacaacgtccttaggtctttagtgtgcatgccaggctgcctcagggttgctctcttccttcttccctctctctctgatgcagagtcaagccaggctgcactgctcgctagactcagtccaggccttccagcctctgagatccttgcctgtgctttcttctctgccctctgtgccttgcatttctgcctgtgagaagcgctcatctgtcgctaacgtcttctccataaatagttttcctcattaccccaatcatcgtgtactttctaaaacttccctggcgcctctgtgcctgagtgtagtggcttaacttgctattactgtagcttgttgtgtcggcttttccctcactgtgactgtaaaccaggcagaggtgtgtgcctgtcttgttcagtgcaataccttgcatttcactgatatccagaaaatactggtgagttaataaaacttaagtgttgctcctatggctccaaactgtgtagaaattgtaacaaaatgtccgaatttctagcagccactaaccctatccacagttatacttcttttagcagaatttccctatgacttttcaactcctgttgcatttgggaccaagaatacaatacctctaactgacttttccctgtgttgatcatttacagatctcagaaaatttccactgtgacctgaactccgaccagttcaaagggtttctgcgagctcacacaccctcgattgacccatcgagtcaggctaggtctgccgtgttctctgtcacctacccatcttcagacatctacctggttgtcaaggtgatcacatacagtccaagatgcatgttctgatattcatgttgttatcttactcggcaacactgacaaaggtcacatgacaggcttgtgtgtcctctgtgatagttgggttgtttccttctcaccaacacttgcccttacaagtaacttctgccggaagactagaaaggtggggggcttgcagggcctgtagtcagaggttgcaatcctgactttggagtcagacactgtgtgacctgctgtgactcaaacttcctcagacttggcttcctacctctggtgatcatactgacctccacaagttgtctcaacttcaaacaaagcctgagccttcctaactgaggaaagccccctcagcagttcttgtctgggaggttgccatgatggaaggtctcctagcaatgttcgggtgtctctagcaccctcggcccagcatcccctgatctgcctctgacaccctgagatatggctgcattttcccacctcactctctcctctattacagatcatgtgtctagtgagagtcaaaatccatggggccattacaaataggatgacactccactggagactgtccatgcaagaaaaccttagaagaccagagcctttctctacatattaaagttactagtttgaatctaacaacaaacattaggtattgaacaacctggccaaataattgtacttagtaactctcgaaggcaaacaagttaaatagctcaagacaagtaaatccaagtgtctgatctcaagggcagtcagacttctgtgtttgagcacttttccgtttagtttggtacccctgtctgcatcacttggattctcatgtggttaatagtggcgaacagggtctaaagaatccgggcagcctggagtttgcttcttttatattatttcacaaagacggcgatagctcaaaggcacctgtttaaggatctagaattttgaaatcggtggctgggactggaaggcctacctgagggttctcagctgtagctcagtaatactagcctaacatggaccaggtactgggctcagtccccaggaactagaaagtataaaaataaaatgataaaatgataaaataagtcttttgttaagactgtgtatctgttgctattattgtaaactctccgtgcgtctcactctggtgtgttaacatacaggaaagcataatttgagctataacagcactgtcgttaaatatacagttctctcaatgggcaaccaacaaaaccacactgattctagagctaattttatttccagcgctacttgattctattaaccttcagtaattacctaacaatggtaatctgttggctgctaccacggacaacatcctctcagattttttaatgtggagctgtacttgtttgacaggaacaaacacattgtaaggtgtctggatatcattaagaaacttaggagcccaagagatggctcagtggttaagaacacaggctgctcccccagaggacccaggttcaattcccagcacccacgtggcagttcacacctgtctgtaacttcagtttcagggaatctgacaccctcatgcagacatacaggcaggcaaaacacaaatagacataaaataaaaaataatgaattattaagaaatttagatctaccctggaaagccctctccctttggtgtctctttgccttgattacaagaccatcatgaagctgctttcctgcaaatacatactaagtggtattgtaacatttaggcaacccaggtaaatgtcatgtgataaagaaagggcttctcactttcttatttttattcccaaaatgaacatcaagatcttgcatgtattctaggctgagtgtcgcctcattccgctatcagatatattacttcaagggataatttcaggctgagacatttagttcaagattttgaggacatgaaagaatttgattgacaaaggaggattgggaagtgaggatgggtgtgaaccctcaagcttttttaaaaaaggtttaaaaatagatcagctatagccgggcagtggtgagacatgtctttaatcccagtacttgggaggcagtgacaggtggatttctaagtttgaggccagcttggtctccagagtgagttccaggacagccagggctacacagagaaaccctgtctcaaaaaacaaaacaacaaacaaacaaacaaacagatcagctaggcattaaacctctgtggctttaatggggactttggaaagtagcctctttgccttaaagctcccagctgttccttcctaatgtgcccctctgccggtgcccatgcttaagagggctcacagtcacacacatgcttacacatcagccaggaaggaccaggcacgagggcttcatctcagactggagttctcagaaagtcaccctgaccaatgcagcaaaggggatagtagttcctgattctgtctgatctcgactcttgattctagaatgtgaggggccttgccatgggtttcaaataaaggcaagatgtggccattccttttggcagagtcccagcttaccacaatccatttcttcttctctttttccttttctcttttcttttctctcttctttttcttcccttctccctccctccctccctccctccctccctctttccttccttcctcccttccttccttcctcccttccttccttcctccctcccttccttcctccctccctcccttccttccttccttccttttcttcctgtgatgctggttatggaacccacagccttgcacatgaaaagcaggtgctctgccattaggctacagtcccagccctgaaggagtcttaataactactcaaggttcactttaaagaccatcatgtctttatttgttgaattcatgggaaacttagcctctcttcagttctttctacggagccttggtggtgagctttgggaggagagaagccatgtttcatgtgctcacagctcttctgcccagcagccacctcatgcagacctttggaataaatgatgaatgagtgaaggaacgaatgctggtggtcaagaacactgctcagtgtctggctccagcccttggtgcccatgtttccagtgtgcttcatctctcagggccagccttctcttaacgctgctggccatggcataagctttcaaaccgcttttgttgaaagagactttctaatggggctacccatgaaaccgttgtccattgagcagctctgtgagacttcctttgaaactccattgcatttacctctgtcagtggaatagtcagagaaatagtttctgcttcacttggtgcctgttaagaatgtgggcccagggtctgtgttgaccagatttctgcttcaggcgtctcagctaatgacacaggctaagggggctaagtcttagcatctaagttcacttcagttttctttgagtaaagaattggaacatttcagacttttccctttctttgccctaaccacggtgcccatagccatgaaaatcaattgtcagctccttaacgtgacgcaaactggcagctatggctagcgttccttagcagaccgaagagacgaaacgtctcaaggcatttctttctgtctgtcaaattcagagaagcagccctaacaggaagtacaagtgcacacttacaggccatttaatctgttcatttatttactgtgtggaaggttttagttccaggcctgacttttacagagaccatgtctcatttttactttgtaagcaataataaagaaaatgagcttttcacttcctacatgtatctcctgggtttggttttataaaataacttttattgcatttttattgtggatataatacatgtttattgtttaaaaaatagaaacttctcatcagcagtaggaagacaataaaaaacacacataatcccatcacataaggaaaccacagttagcatttgctgttatcttctttttaatatgccttgtgccttttctactgtgaaactctgtggtagtctccacagtgtgtgtgtgtgtgtgtgtggttgtttttttttttttttttttgagacaaattttctctgtagctctggctgtcttggaactcactctgtagaacaggctggcctcaaactcagagatcttccttccagtgtctctcgagtactggaattaaaggcatgcactaccatgctatattttaaaatctgagagcatatgtaaaaaacaccctatatcattaaatattgtcattaaacatgattttcatgtttgcatagatcccattatataactataactcactcactttgttttaatgctatttttgttggtagattgaaaaggtccttcagcaaggagagattgcagactgtgcagaaccctacatgatcatcaaagaaagcgatggtggaaaggtatggccatttaagtactgggaacatcttaggatgaactaatttacaaacaaataattttcaacaaaatagtggagttagactaccgtattttccatttgaaaacatgggtaaattgtatttttatgaaagaagaaagagaaaccagttactgacaaaaaaaaagaagttttaaaacaaatacatgattgacaccctaaggatgtcacttgccagtgtgaactctggcttagatcaagccacaccggctgccttggttctgaggctccaacttgagagggttgccaaggccccataagcagaagagggcaagagctcttggttttcctcaacagcacaaggtattgtcttatgcagcattcatagctggtcaccagccgctgctcctgctcatcataaattaattagcacattataagtcctaagacatgactaagactcttctcagtgccaatttacaaaagtttccagttttaaaaacatggcccttttggaatcagtcagtcttgtaaacttcaattaaaagtagttgaactcaataaagacagatactggcgttttaaaatctgttagtatgattttaggaagaactcctttggaagcattatcaacaacaaggacattgttaggaataattaagactctttttagaatttcaaagtagctttcgtaaagtagattctcttgggactttgatagataacatactaacctttctttccccagtttttctcaggagaattgaagttatctaggtaaacggtgtgtttgcatgttggctgctgtaacaagccatgtaatgaagcatgtcttcataacaaaaaaaaaaaagtcatctgctaactgattgctgtcctttaggggggaaaaatctcttccttttgtaacctttgcttccttatcagctagacttcagcctaaactgttgcttcctgttgactcatggcccgcccccctcccctctccccccaccaggcccatcagagtagctactgtcaccccatgcaggcagacaacttggtgctgacgctttgtttcatcttgtctctttactgtcttcctccagagtaaagaaaaggttgaaaaactaaaacttcaagctgaatccttctgccaacgtttggggaaataccggatgcccttcgcctgggcccccattagcttagcaagcttcttcaacatctccacccttgaaagggagagcacagatgtggagcctggggttggtaagatctccatctgggtcgggaggcagagggctcccccatatgccacctttgcggttatctgctcattagtaaggacttgagaaaaccagagggtgtgagtaggtgagaggaagatcataaatagacgactaaactgcacatgcttggtcagtgaccccgaaacaattactgtgagcagctatggagcctaagcacatacactcttctactaagaactttgtatggagttttaagcccttaaaaagttaattgaaacaattgccatgagccgttatggaactttaaatacactcttctactaagaacttcctatggagttttgagcctttaaaaagttaattttgagtagccatcccatctcaaaaattaaaatgcttgaaaatgacaagaacatgggtgagcaggcacagtaaacaaagacactgtgactggctcccacacagagggatgggcactgtccaaagctctgagagcaaaactctggctctgagagcaaaactctggctcctcagcaaaatctctggcctcctaaagtctactttgcccagtacaatgagagtaagcatcgaaagtagccagcagttaactcttctaacttaccgcaccgaggccccttttcgtcgcctcttcataaatgtgaaccagtcatgtctacagtttcagggtggaaatgtcccagtgagtttagttttcaagtggacccacgcccaccagctgtggtggattttctgttttcctaaacaccttcgtattccgcaaatatccgagtcggcccttggatgtttcgtgcattccttggctctgccagttctgaaatgttgccttctgctgggagtggaggccacagaggctgctactgctgctgccctcctggagttactgttgcataatcagcagacagaactgcattctttttgatttgtcagtaaacttcaccccttctgaccttcacatccagtttttctaaggcagttgttctatgtattgacttattacaaagggtgggggagctccgtgggcatctctagtccacgtaattcaggcagagggcttgccgagatgttggttaggtctaagttgaggatagttcatcattagcactgaagctgatttcctaagtagtagccagagagccagcacattacacagtttaggtagcccaatggtagctctcatcagcatgagagttgggcatagcaacactcaagagctgtgctttctaggcagtggactatacagaacagaacccttaggcttgcagaatataagacacaaggttacaacctggttcttcaaaagaaataagaaatgaggaagctattgagagccttagccctgtctggtttctagtgaaaaggtcagccagggcacttctgctgcctgctccacactagagcagagacaaactggatccagaatgtgcacaagctggtttgcatccccggtgccttcaggggtgtctgagtgcgtgctctcccagaggaacacaagtgtaaaaagcaaagcaaccaccgggctgactcaacagcctatcagcagacccagtactggctgagctccagattcttgcagggtgacacctagccacctctgttctccagcaggaaggacttagagccactagggttctctctgctctagtaagaatattagggactttagcaggaggactaaggaaggttgagccccgtggagggagggctgggttcagcaataattgctgtgtgttctgacatgtaagaataacaactgctttcctcaagggaggaactctgtgggtgagaagaggagcttgtcccaatccaggaggccctctgagcgaaccctctccttggaggaaaatggagttggatccaacttcaaagccaccaccttggccaccaacatcttcttcaaacaggtatctgtgtctgttacagtgcagttggattcggttgtattgatgagggtggtagatccaagggagtagtgaaatgtgatcagagaagtcaattagtgtcgtttgttcagctggattgttgcgaagattagagcgcatgcaagcgtgcacaagaccagctgccacaggtcaggaactgtgtggagctcgtagctaatcacacagcagaccttttctctgagggagcaaaacttaattctctggggcctgtgaaaaggggcgagggaacacacacacacacacaaaacttaattctctgggacctgtgaaaaggggcaagggaacacacacacacacacactggataaagcaaggctccaacaactttgttttttctcttagcctttttataccacctaaaacaaaacttctctatacaagaaaaaagattacctcatacccacaagtaacatattctctaaaaacaatcatcacaaaaaaacatattcttcaaaaacaggttaaaaccatgacccaaggggagattacaacatgattactgattaaatattcttttgaaacccacacccacctgaacagttctcatctatctttctccccacaaatccatcctgacctcaaggcaatgattcttctgtcattgattaacgaagtttaatcaagctgtccactgtagccagttttccctatgctagctgacggcagtttgtatttaccaagaaacatatctcttatcttgcatctcctagtcatctgttctctattgttatactcataataggaccgtttacattttatttctaaccctgccttttcatggtgcacaccgaaacctgtgatggtatccttagatcacaagatcaagagacacagagccaacctagagtgttttcttgaagcattaatctgtctcagaccttcctttccacaagccagaccatgagcttgtagtgcatgagagctcaccgtgcccctttcctagcctgtacagccctcactactctacacagagggggcatattctactcttagttctgtctttgttagatgttcctggcaaaacccacctaaaccatctcctgaatcttccttgtcaactcccctaacttcccaaaaccatttaaatcaaatcaggagtctgtaaaattaccaactcatcaaaacgacattgttctgtgaaagtttatcttcatattgatctgtagaaaaattgcccaatagagtgggctgtctcccataaagcagtcacaccagactatgggcagtgggggtcttgccaagcccaatcacaccatgctagatacaggaggaaatatggcaatgacagactcgaaaaggcacagcagtagcaagaagcaagccagggacaaccccttggggctgtgcctctctgtgttaaatccatcacagctgtgcaaaaacagtggcccatctccagggagctctcttgcatctgccacaggtgtggccgtggccggacacctcccgtggtgggcatgtagagggtggggcttacacataccttccttattcaagacaaaggtgaagacaatgaaatcagaaagaaagatgattttcccatctccatatctctgaagaagtgagctagttcagcattgtttcagggactaaaaagagcttctgttagttgacatttacatgacagccacatgtgaccttgggtcctcaaggtcagatggctgtctcagagagctgtagaggttctgtctgcagcaatgctgacgagaggttggctgaggagagcatggggtgctagtgcttgcactaactgatttcagagcggcccctcacgctcatctctatgagaaacttgttaaaaatcaaatagataagccaagggtgggagcactcaggagactgagacaggaggatttgcaagtttgaggtcagcttgagctacctagtcgaatacacaaaagtaatcattttaaaaaatggctgtcagggggaaatcttagaaatagctggtccaagtccaggaatcagcagaggctccccactaaccctaaacatctctcggcaggagggagatcgccttagtgatgaagacttgttcaagtttttagctgactacaagagatcttcatccctacagcgaagagtcaaatccatcccaggtgtgcttggcttctccttagcatcttcggtccaggctgcttctgttgctatgataccatactgaccaaaggccactgggaagagggaagggctcacttggctttactctatcacattgtggtccatccttgagggaaggcagggtaggagcccaggatgatcctcctgtcaggccctgaagcagcaagcatggaagaatgctgctcactggctcgctcctgggatcacatttggctgccttcctcctaccgctcagcctcacctgcctaagggtgttgccgcccaccctcaatggggtgtgccctcccacactaattagcaatcaagaaaatacttcgaagactgtttgatcataggccagtttgagcctgacagttcttcagttgaggtttccactccccaggtgattgtagattcatgtgaagttgtctgtcaactgcagcgagctatgacactcttcaactatgcccaagccatttgtgattgacatttcttgtttaatgctttcatttataaaaactgctgagggcaatgtggatttttgcatttgaagttaagaatctaaactgctgtgcatttttgacaaatctattaatgttttcttattcataaagggcatattctacagatagtataatttagatttggtctctcaagaaagtctgataatcatttgaacatatcaacacaccccttatcacacaaaatgttatatggaagtctggcatttaaagagagtgggatgatttggcggacgaagacacacttaccctcaagcgaatgcccatgtgctatttctgtatagcatatgttgtgtctatatttctctgacacccaaggtgagagacctcaacccaaagcccaccaatttttactgctcccaatacctgaaagttttttttaaccatgtatagctgtagtatggtggatctgggccttctagtcagctccttctcattatatagctccttactttggtgttataaaatgctcctctcaaaagttatcatggcaggcttttacaatctcaaattttaggaaattatctgggaactccaaaatgcatgtgctcctgcaggtcatccaacagagtatccctgggctccttcttgatgtgacagatttcagtaactccccacccccgacccccatggcttgctctaggctcactgaggctggagatatccccagctcccgacgtgatgaactgctgcctgacgcccgagatgctgccagtcaaaccttttcctgaaaatcggacgcgtccacacaaggagattttggaatttccgatccgggaggtgtacgtccctcacactgtgtacaggtgagaaatgtgggcccttgtttggataatacactcgtctctccagaaccagcccctcttccgtcttcctgagtatgagggggaaactaaacgtgacagcttagaaccacagagaacatttaggtcgcttctagagatgccttgcctaatgctttggaataaggatgtatttttttcagtcatagttgtaatagattctactggatgtattcttaccagaaatgaaaaaaaaaaaaaaaaaaagaaaaatggaaagaaaaccaaatctatcaccatggctttcttccatgcagacagtctttaaggacgagaggaacatgactggaatgtcctaggtgtctaaggtttcacacaggcatggtgtcacatgcctaattccagtgcttaggaggccagtgtgggcttcatggtgagctccaggccagtctggattacaggcaaaacaattccaaatgaagcacaggttttcagctgaaaacccagctctattcaggaaacgttagtcagtttagacagacatagtcctcagacgctgctgcccagtgctttagtgtgtggttgttaggctgatgcaataggcaaaattaaagtgccatcttatttggtttccaattaatttccttgtaagtgtcacggctaccatactgaatggcaaaagagtaagataccgtagaaatgaaggtgaggctgctcagctttcctagtggcctcgtgcccctgactcttagggaatttgaagtggccacccaaacaaagcattgttgctcatgagctctcgcttccgaaatgtggggggagagtgctgaatcgggcgtcatttctcaacttatccatcaatgacactttgtggtttgctttccgtataaaatatctcatcaggtcttactgatctcacaaagtcacccttgtgccttgctgcctgtggcgcttcctttgcttgtggcagaaaccaaacacctgccaagaagcaacttaaggaaggagggagggagggaggaatggggagaggaagcgagggactctgttaactcacagtttgagggcatacagcccgtttgagagagggagacatgacggcagtggcgcatggtagagtgctgtacagctctacagaggaccacctcacagcctggctgagtgggaagcagaccgggagtcgggctggctcccaatgacaaatgcacttccagtggagatgctccacccactaaagaccacgccttccaaccagcaccacttgctgaggaccatgtgctcaaatacaggagcttgtgagggacattttaccttcataccacagccatgctcagcacaacttatatgtgccttcctatgtgtgcgtgtgtgtgtgcgcgcgcgcatatctctgcatacagatgctgttatgtttatattcatgtatatatattgtctatatattgtgtactttggcttttttcactcgatagtgttttcttatctcttttgagtattacaatgcagctacacattgtattaactccgtgcattatgctcatcgttagtcatggtgttgtgtgtttaaccagtggaaacttctaaaaagcttgtatttttttttaaatatgaatactgatctatgtagatcagtattggttttcttgttctgtattattcctttgtctaaagaggccatattgtatttattcagttcaattgggaaacatttggggatttttttttcccctgcttgccttttgttaagcatttatggttttgagtgtacgtgtgtgtgtgtgtgtgtgtgtgtgtgtgtgtgtaggccagaggtcaatttcaggagctacatacgttgcttattgagataaggtctttcactgggagctgggctcacaaattagactagactttctgctcaatggctctcccatgtctgaattcccagcattaggactataaacaaatgatgccgtgcttgggttttccatggtagggagagggtgtcaagcccgggtttttgtgttagcatggcaagggcttagtctatgagctctctctagatgagccagctctccaccctaacatttgtggctttccttttaaattaattgagttttatgtgtatttgtgtcctgcctacatatatatctatgcaccacgtgtatgtctggtgttcatgaagggcagaaaagggcagttccgccaagctagagtgaccaagcgtttggagctgccacgtgggtgctgggacttgaacatggtttgtctggaagagcaacccgtgcttttaactgcatctcacctggcctcagcatttgtggttttgactcatcctgcccagtgacagatttttttatcttgtccctctgtgagtgtgtgtgaaaagtttccctacgagtatgcctaacggtgaaattactgggacaggtgatatttgtttttagtgactttcatattgtttctttacccccctacacacacacacaaaagaaatggatggttatctattctcccagcaatgtgtgggagcccccatctctccagttcctcacttcctcactcgtgctttcctatgtgacatgcaaggagtgttagagccagcccacctgtccccaccgcacatgcactaacctgagtcctggaaaggacaggtgtccagtgaaccaagtaaaaagttaccatgagaaacacactcaggtgccccacagtaagacatggcgcgcttccttctggtgcttgtgaggcaacaggacccccaactttatccttcctgaagcaactcctcattttcttcaacaccaaatcagcctttggtctccctccttaaagagccacaagtatttataggaagtgctcattccgttccccactccatgaaggacgacggaggcatgaccatgtttgcttacagttgccatctccatctctgtggaaaccctatcctttaattggaagaggaagcttgtggcatgggaataaacttgtaccacatgaattctatagctatccaactgttcccaccaccccagcacttaaccacccgcaggagtcatttactacagacactatcctttaatcacatcgctgcaggatttggagtgcatccgtgcactgactgagccattcagaatgtaccagtgctgaggacaagtctaggcagcttactctgcaccctgcatggcgacctgagaaacaggcctgcaggcgtagagctgctgttctttggttgtgccatagaatggttacagccgctcctctggaaccaggtcttcactctggcaagtgatggaaggcaattctttccagggtggtgaaggagggacctgttcttggctctaggctattgtgtcttaacagcatgtttgtggaaagatacacgtaacacacttgacccagaatctttcagcgtgaaaacttcaaggaatttagaaagcatgttgtcttaacttcttgtggtgttagaatttagtattgcttctatggtcctcatgtgctgagagctcacatctgatccacaagcaaacaaaaagagaaacggatagctgggaatggaacgggcttttggaaccttaaagcccacttccagtgacacagctccccaacaaggccacacctcctaatccttcccaaacagtttcaccaagtgcagaccaagcactcaaatgtatgaacttaggggagacattttcattcaatcatcacaaaatacaggaaaatgggctctgaagagcacatcaattcaaggataaatccttgacacttaatctcacgaatgtgatatatgacttaacttataaatactttgtatagctatcccctacaaaggataaatgcatctggtatgccaaacaataaatgcttccatggccaaagccagaagtttagggtcagatttgtcattgtcaccagactgttcagggaagggggttaatggcagacatcaacccttgcttcctccctcctcctcaggtaactccgttgttagctgtgtctcttcagtgtcttctgccaagctcactgtggatgaccattctagctgagtcctgtgtggactctacccccaggtacctctaccatctacaagttgctatgagaaaagggcccaaggcccatcatgacagaaccattcaggttttccaagcgttaagcattcatagaatgaacgcttgctcagacagtcgaaatcacttcacatattgagaagtgctactccgaaaacagactagatcgctgacgtcagagaccccggtcttctgaaaccacattcagcctcttgctaccggcaggaaggatagatttgacttacagtatcagtgcctgtgaagggactgaactagaaaggtgtcctctgagacagacccaggcaagcagctctaagaagtcaccaagtaggaagctaaggttgacaaaaaaaaaaaaaaaaaaaagacagtccaagtctgagcttgcattcctgtctccataaccagacttttcctttttaaagactagacatttgcctaagaatgcattggaacaactcctggcatatttttcctgatgcccaacacagctggcaatagaggtaccagatgcctcgtggtaggagcagaataaaaataatgtgagttggggcccagcctgggcaagaccttcaaggccatcttatcaggtggcagccatggggggggggggtgtgcagagatcacaggctcagagtttgtaatgagcttgttaactccatgtcgaccttttaactagtgattacactaaagcaagccacataaagtacgttttcatctctcggcccagcctccgaagaagtcttgtttatctaattattggactgctttggaggactgtgcttgccgagaacaaggctgtcagtcggaacacaattgctttgatggataattagctgtttccaggcctcctcctattcagctgcgtgttctcagaccagaaagcctgatctggcctaacaaggaggagcctctggtgcccctgtgatgtcttgctggattctgtgaggcttgtggcatagcagagaagagaaaggctcggggtaggtatagggctgtttccaaatgatcatcagggagctggagtttagtgactgtgatcggtaggaacccaaagtactcagaggaaccgtctgcggcagagggtttgcccttgagtgggacttgattgtttttaataaaatagactttcagtttaaacccagttatcgttatttctaaagtggatcttttcagtaccggaaggaagtgtgggcatgtcacacaatgtctggtctcactctggagggccctgctcaggagccccaggaactgtgctaggttctccactatatgacgtcatccaaaggtctgttgtgacttagagtggcccaccccttcatccacttgatttgggaagcgatcccagtgttcatctagatttgcagtcaagtgcgtttgtcaaagaacacgtagtagtctctaagcctcacatctcacgtgagggtggtgcttgctctccgtgctgtggtgcggcccacttgcctgtgtgctgactcagcatcatcaccaaggaatcttggtcatataaaaaagcttagacctcatttctttaaatctccataaatgtgcctctactgaaatctctatcaaaagcaccctccactcttcattgttccattagttgttcgagttttatttcctaaggaataggtaacctcattcacaggttccaaatattaaaggtaccgaaggcagagtgaaaattccttctgccactcctgacttgcagccacttccagttctcctcgttggaaacagctcgtttatgtatgtggagtggctcacttataaaagccccgtgccgcaagctggtgcttgctatgcctgctgaaactaagcagtgggcttctaagagatttaccagagaaacagcagtgaacagaagagatggacagagtgtatgcgccatacctcaggccggctgtggaccagtggattcaattttgcttctttgcagatgtgaactggacctatgcacacgttacagagcatgacccccacaaactgttcctcctgagaagccgggtgtgcagggcactctttatgaacacacagaactctctcttgctttttcagagctgtgcttaatctaaccatacgttttcctgagtgaatcttgtgctgaggaaggaaccttttttgctttatagttataatggaatagcttagcctacacacttcatgcttgtctagttattggacggttttgtgcttttcaccctttggagaagtgtttaaggaggtccaccttaagagagaacggttaggcatttgttttactgggcttagcaagcagtggccagaactccctaacaaaccatttacttcagatgagcagtggggaaaaaaaaaaaaaaaaaaatcaagctgtttgaaaaagccaagaaatggaaacaaaaatgcttccagctcaggcctcgtgcaaaaaagggacacagagcccacatcctgatgtctggctcccaaactcaacaataaacaatcctctttttttctaagaatggaaaaattcagaagagagccgacaacgtcctttacagccttttattttatttttattcctgagctatgattttagtgcaccattcagccacttgagggcacagttctctcacttctggactcaggcaagcagctaccttttgcattagaaaacagatacactgttttgttacagaggcccacacattttatggctcatctcttaaacgcaagaccaagaaaaaatgagaaggaccccagcacttcaggaggagcttctgttcctttttttttttttttttttttttttgcaaaggattttattcttaccaccagctccatcttcttcctcggtatttagcgcttttttgggaaggtggagtggaaagaggccaaggtgtgcatcccatgacacagagtgaagtctccttggagggcggtagttcactatataacccactcctttggggcagtagtgccctgtacaaacctacacttctaccaacgctctctggtacaggaaactgaagcagagccaaggattaggtgggaggtacaggggaggcagtgaggaatggtgcatgaagacaggctatgtgcatagtcgttggctgtacagttcaggcttatgctcatctggacctaccatgcttcaattgctgctccctcccgtttgactgttctaattaagtcttgctttttaatgttatagatgctatttttaccctataggtcctatttatagaacgcagcaagaggttcacaagaccctcttttcagatagcctcaggtcaaggctcactggggcagaaggtatggggaggtaattagatgaaggcaaatcccggcttgtagttcactatgatgcatggtttgtctagactggagagaactccctgaaatccaggaggcagtctttggtttctgtattttgattaacctttgtcgtcattgtttccagacagggtctcactgatctgctcgggttggctccagacttctgggctgaagtgaccctcctgcctctgcctcccaggaaatagggaatcaatgctcctttgtttgtttgtttgtttcaaaactggtcttcagcagggctaactcctctgatggatcagccctcaggactattcctcttacttcttgttctgatgtaggagagaatggggaccttctatctttaagtgttttcatcctcagtttcaactctcctatctactgaggtccccaaaagtcaacattcatttactcctctctagagcagaggtatttaacagctctccatgaatggatggatgccctgtggtttcaggcctcaaacagcctgaccttggaccctcacagcaggaatcagggctaaccaagagatgctgtgtcagggttttctgaggggaagagtggatgtcggtgggagaggcagacaaacaccacaggtacaaatccacataaccaggcctgcaggatcaagcgggaggcctgaattctgacagcgtagtaagacaatgtgtttttacttttagttttattttggtgctggagatggaagttaaggcctcccgctgctaagcatacactctacaactgagctatatacgcatcagcccccacttaagaaaccatggctaactgattacacatatatttttagattgaaaagtaaaattatttgcccactagcttaaaataccagagagattataaggatgcaagcgatgggtctatcctacctcttttacttcatatttttgctaaataacttccaaggtatgagtttagatctatgcaactattcgtggaaatataaatgggatagtttaattaggataaaatcagagggcctcaacgtattggttcgctgtgttctaaaggatttgtaccctgaggctaatagttatgtttagtggtgagaaaatcctgtgcatatttctcagcttttcttcaaagtttaaaagtaagcctgggctgcggcagggcgatttatcatgctgactcccaggtgatgcagatgtcaattgtcccttgctcccctatggacagctggcagtagcagaattatagagcatttgtaagtgtgtgtttacaaagcagacttccacttaaaaaaagacagacacattagattggtaggtttcctaagtccagaacacataaaaaactgagctctgaaggcagggcctgatggcacccatctacaaggccaaaaggctacctaaaagaaacactgtcaaaaaccaaaaccaatccaagttctgagatttccgactttactcctttgttctttgtatatttaaaacccctaaagcttctctctgacactgaggggcagcacctgtacatagtaaatgtggaataacgtcagccattcctattacatctaaaatagatctccctggaagtgaaatgtgaatggcaaacaagaatcacctcctccgctatctgccttgcttaaagagtggagctagccactttcctttgcaggcttgtatcaggccatcagctcaccacagatgctggcattagcaggcatctgggcatctgctggcatcagccttgccctctggctgctgaagaggtgaagggcacccacttttctgtttgcagtgaatcctcttgggggggggggcggttagctcacctgcatttccactgccgcagcacctcagctctttgactttgcctctgcaaattagaattagaagctaagatccacatatgagagaaggatttagcattcgtctttctgagtctgggacacctcacttaaatatgttttacagttcatctgttttcctgatgatttcataatatattttatagctgaataaaattctgcatagataccatattttcattatttattcatctgttgatggacatctgggttcattccatttccttcccattgtgaatagggcctctatgaacacagatgagcaagcgtctctgtagtaagatatagagacgtttaggtgtgcggatgctttagcagcaaagctgactcagggagatctatttctagggcagaaaaacctatttttctgtcccccgcttctagaatccgtatctaagatctaggatttccttaggctgtaagcatctgagcatgtgttacttaacacatattaatatgtactgacttcctcacttattgtatatactctatataacattataacagcctgtctcaaaccaccaccaacaacaacaaaaagtgttaaaaaacaggtttcaagagccgggtgtggtggcgcacacctttaattccagcactcgagaggcagaggcaggtggatttctgagttcgaggccagcctggtctacaaagtgagctccaggacagccagggctatacagagaaaccctgtctcgaaaaaccaaaaaagaaaagaaaagaaacgggtttcagttgtcacagaggcagtgacagagtgaggggtggtattcagaaacacacagagatggggagttgggaagaggcaggaagacatacacctgcaaattaaagatgcagagaaagcaagagagacacagaagctagagacagtgagaggtggggagagcaatccggagggtttgatccagcctccacatccccaagctctgcacttctgctgagatctagacttggggatgtcaccgtgttcacaggcatcctcgtgcacgacggttgacagcaacccttttacaacaggtcaggaaatgaacttaaaacccagtttgctctgctacagaaacacgtaatttaccagcagtgccagtgtacagaagacagcccatacaatagaaaatcagtacttttttttcctccattaaaaaaaagtgcatttagatatcattccttcatcccaggctgcatattgaaataacagaaagaaagctaaaattggcaccaattccatttcaaagtcaaacctactgcttttcatttcccagtcttttccagcccctgctttcataggtcctcatgttctgcctaacttttagccctgtcagagtctttgtgttttgtttgatttggtttggtgtggtttttttttttttttttttttttttttttttttttttggtttttggcggggtttgtttgttttgtttgtttgtttgtttgtttagttgcattctgggtttttacccaacatcgtgtgtggaaagaaagcctttgactctcctcagctgcactttcaaagagacacacacagggaagaagcgtccagggtttgccatgaacagtgatcgctgatccgtggtgcttttgttgatccgtggtgcttgttgggatctctaagcctgcggtgaagtcttcccagagttccagaggctgcattctggctctgctggctgcccttccttgtgtaccttggcaagtgcagaagtaagaaacacaaatatatcttattcaaaccgtggtctaggagacccgggtcaggagtggaagacgtgggaacaccgcatgaagggttggcttgctctctactctcactaaccagaaaacggtctctgtcaccgctatcatagactttcctccctgtggcatagtttccatcccgctgaagtcgtggtcccctgacctgatcagtgataaggtattcactgtgacatcatctgtcacctttgcacagaaagcgcattcgctctaaggagctcagcagcagctggtgctccaggaatgtcactggctcatgaaacttctccgtggacctcactcttgtggccagctcgtccttctgacagagggtttattccaccctttcgcctgtttggctttcagtgtgctctgcactttgttcccttcctgctggctgatgtgatctcgaagctcagctacagagccatttaagttgtccagttgttccaacagaagctaacatgctttctatgagagctgacttgctccttgatcctaacagagctgtagaagcctctggaaagtgcttgagtgttgtcctggggaaaggggtaagggtgagcttttctcttcctttccttgcccttttagataagggatagactaaacttaggaaaagccaaactaatgtgtttttatgctgtggctttaaatgttcctttgggctaacctgttctccacaaaggaaataaaggacagtgccaagatggtaagaaaaaaagagttcaatgtttgatctatgaatggctgcagttccacagttagtcctggacctcaaatgagttttaaactaagctgagggctagggacaaagctcaatgcttgcctagcatgtgtaagaccttaggctcgacttctagcactggaagatgataaccacatatatatacacacagttatcccgagctagtatctcgctaccaagaattcactcggacaaccggattcttctacggcaaagctttattgcttcatctgaaggaagaccccgaacaaggaaaatggtgccgcctatataccccttcgtgtgacatgtcagctcctgattagctgctcactcatcaccccactactacgccccgggatgggcagtgacttatttactcttgcacctgcgcacattacttgtttaccagttaggcacagcggaggctcatgatggcgattgctcatggctctccacacacagtcataagtatataaatggcatattcctgaatctgtgggaagaattaacaacctatagagctgctaatcaagagaatccatctgaaggatgcttaaaacactctttggaagggtaacatccaactttctccttctctaagctgggatgcatataagtaaaaaacatctctttgattacatttctccaaatgtgattaaaaaaaataagatgaggctcagatgccttgcacattcatgaggcctctagttattacagaacctgtcaaaacagcttcattcttcatatgagtgattcctgtttacaatatggactgtcttcttacaggctcttcaataatgtaatttttacaattttccttaatactaacttatactataaattacatgagtctgttgaccagttgactaagattactcttctctgatacaagctctggattacagactagacatagagatcttccctgtcaaaaggaaagcattattctcttctgttcattctgtaagagatgctaatctgccaaagacattacttagcattcttgtcagtaaggaatatggtggtccttaggaaaacaatcttctcaaaaacattttaggcaaactcactctacttttctgggagtcggtttcatggtctgcaaaaagggatattaaaccaaattctctaagactttttcttctgttgtgtgtgtgcagacagtatcaacataaccttgacaggtatgctggtgacactcgaaaaggtctagcaaccccttcagaagcactgtgcaaaacagttgactggtgttgggtcataggggacaggtctgtggtgcctgcttactggggtcaaagacgagagtggtaacagcgaaccacactgtccagtccagcaggccactgctagagtgacttacacgcccttcatccagctgcttcaaagcattttcaaaccctagctcatcagtcctccaagcacagcattaaaggatgatcagtggctatcaattaatctaaacatgaaaatcggagcactccagggtttaaaagaattctttcaaaagtctactgcatggcaaaagatcaagatacaaggtgttcatcacagctctataatcaatgaaagggagaaaaatcacataaatgtgctttgggggctattatatactgcagcacattcattatatgaagtagtgttcagtaattaaaatcatgattatgaagaatatctaataacattggaaatggctataattgaacagtattagacactaaaacacgaaattgtatacacagtttgatttttaaaaaatatttattgtatgatggaaaagactaaatggaaacatgctaaagtttttaccatagttcgcctcacacaggaataatgaatggttgctgttttcttctaaagaatcctttagtgttaaatactttcctgtgcttttcagctattcattggtaaaaacctgtgcacattatacagctgtggtcatgtattactttcacaatcataatcatgtatagatagaattatgtgactataaagtaacatgagcctgtatttgtatgtgagagagagatgcaggatgtggcatagatcagttagatgagatgttaggagaaaactgggaggctgtgccatatgatctgaagccccagtgttcagaaagctgagaaagctgtgggaactgctggagagaaggcagtggggtcaggagtattgtttaaatgtgctaaccgaaaaaagtcaatgtggaaaaagcaatgaaaaataaagtcagagaactagagaatttgctcagaggttaagagtttgtcttagtcagggtttctattcctgcacaaacatcatgaccaagaagcaaattgggggaggaaagggtttattcagcttacatttctacattgctgttcatcacttaaggaagtcaggactggaactcaagcaggtcaggaagcaggagctgatgcagaggccatggagggttgttctttactggcttgcctcccctggctttctcagcctgctctcttatagaacccaagactaccagcccagagatagcaccacccacaaggggcctttcccccttgatcactaattgagaaaatgccttacagttggatctcatggaggcatttcctcaactgaagctcctttctctgtgataactccagctgtgtcaagttgacacaaaactagccagtacagagtctttgttctagatgtggtggcccaggcctttaaaacttgggaggcagagtcaggtgggtgtttataagtttgaagccagtctggtctatatagttccaggtcagccagggctgtctcacaaacaaacaaacaatacgtattgctcttgcagagtcgtcaggtttggttccagtacctgcatggtggctctcaagcatccctaattcattttaggggagctgacatcctcttctgaccttcaagaacagcaggcgtgcccacagagcacacacatgcacacaggcaaaatggtcacatataaataaatcataaaaaaaaaagatccacaataaaagtttgggaaaccatggtagggaggggccagatacagctctttatatttttcaaagatccctctctaggaagcaaaagtgaattgagaaagaactgctgtgttagaaagatgcctccgtggttaagaccactggatgctcttccaaagggccctcgcacccacatgatggctcacaagcatctattaactccaatccccagggctctaacacccttctccggcttctgcatgcatcaggcacacatgcatacatatatacatacatatacatacatatctactcagacatatgtgtagataaaacatccatacacagaaaaataataagtaattctttttaaagaatgaaagaaggaggctctgtgctccaagtgacaggtgagggtggtctggagtggagagaatgaggatgggtggaggggagaggggagtgcacctctagtttgtccactttgtggaagaacctgtcacttgaatagccattgttagtgagttctcggttttcctttctattctttccttccctccctctccctgtctttggctgtgtgaaatagggtctcttgctgtgtagccaaggttgactaagaacttgcagcaggcctctgcccatcccaaagcctattggttggtgcctttattagtcccctgatgctttgggaagcctaactctccagaaacagaggctgtcaaagccatacaggtagaagccaagatggattccaatctctgctctctggctccagtactaaccctttctaagatatcctatcccagctgtgcaataaacactaacctgcttatggacatggctgcagtgaggataagcaagaaggagcaatgggcagaggagtgcatactccctagacagacatgtttatgtgttcgtacccatgcatgtgtgcatttgcgtgcacatacacacacagtacattaatatgtcagtgtccactcttgatggcacctgttcctcgaccgtactagatttactctgactaatgaatgagatcggcaggtccactgagacagcagagggcagagaagacgcagtggatgttgggtcttctgctctcagtggctgactcattgaggagcccacctcagctcacaaggctgtgaacttctcatcttagaaagtattggcttgcactcggtacctcgtcttgaaggacactccccccaccccaccccaccccaccccactcccgttctacaccaatccttttgttgtaccatgacctgccatctgcattcctggataggctgtgtacactccaatatttgaagcacattgaatattctggccattgaaattaagtttagattgttgtcttacattccttttcatttgagtgtgagaagtattcagtgtagacaggaataagagccaacaagaggacgggataaagacagattaaaaccaagggcaaaaatccagaggtgagtcagggaggtgactattgtgtgaagtcaggatggcctagaaaggccatgcaactctaccagcccctagactctcacccccgtcctgtctccagggagcacccagtttagagaaacagggccaacaaagcataggaattctgtgcatttgcccctgtgacctttgaactttacacacaagtcaacagctcctgtgttcttcagagttccaaatattgattttcttcttgaattacctgaaagcattccttactacaagatatttgaggagaaaatccttgggttttgttctgtcttgtcttttgatttttttttttgttttgttttcaaggcagaattgtgctatgggacccctggctggtctgcatttccttctgtacatcaagctggcctcaaactcgcagtgagcctcttgcctgtgccactcgagctctgggaatcgcatgtattacagttctgcgcccagctcagaagaatccttgggttgtaatttcttcctggatatgacatgttcttctgaagccagatacctttattttggtgtttctcctagtgatttcctaggatgtaaaagttctaaaatatagtgagaaaacccagccaaataaaatgagtgctgaggtctaaatatttggggaaaggagtagagagagcccttttccttctaaggcagtgtttctcagcctgtgggtctcgactccttcctttcacagggtcctcttaagaccatggaagacatagatggttgcattgtgcatcataatggtagcaaaattacagttatgaagtagcagtgaaaataactttctggggggggggtattgctgtaacatgaggaactgtataaagggtctcagcattaggaaggtcaagaatcactgctgtaaggcattcaggctacacagtagcctgttcatcttaatttgccccaagcttccccagcagtttggctaccccgccaccttcttttctccaaatacctgttaacactacatatagcactgggattagaaagagtagagcagactggagagtacaggcatagggggcagtgttaaccacctcaaagctaatggactaggccttattctgaaatgggggacggggaggggagttaggcctagttcccaaatctggcttctctctaatgtgctatctacttagttcagaaatctgcacgttttgaaacacttagaaatctcatctcatcctctttccagaccagggcagggattctgaacatgagcttgcctctcccgagtggtgactgagtggttcaccaggattaggcttataacatgactttctgtgctcatttgatccaaagtgactactgtggggctctcttcacagtccaccagaagcaggtccactcagccgttcattcacctcacacgtgactactaaattcatgaagtcttttctagtgaaacatactttacattttaatgtagacccaattgataacattaataatttaataatatatagtaagaatgaaaaatatgctaaatctttaaagaaatttattcagatagtgtgtgtgtgtgtctatatgaacatgttagtgtaagtgcatgctcactgagatgaagatgaagaagatgatgacaggtgtcctccagctattccacagaggcagggtctagttctcaatcgagagctcaggtctgccaggctggaagccagcaagctccagagagcctcgtttctctgcctccccctcagatatgaggttacaagcattctccaggtgcccagtttgttgcctggatactggtatccaaactttgttcttcatggttgtgattcaagtgttcttaaccatagagtcatgtaaacagagacagcccggcagcatttgtcatcatcccaaaacaacatacgggatcatcgcagtagtatggacacgggttgcagaagacaccttgggaaataacaaagccatattgccttccggatgactcctcatctcatcagtcatttccagcgggagacactttatggcagcgtagcattacctacttttagtgtgacccaaacccgtcgaatgcttgtcttctgcatctgctaatacaaggttcatgtcgcagccgccgacacagccctctgtcctcatagtcaccagcttgtagtgcagattctgaactatggtctggactatggttgttgagctgcgccatctcctgcccctgtggtcctggccactgtaataccatggtggtgtctcacaaaacccacacaggtctgccatcaccttagagagcaacttctggactgaaacaaaagccgaagtgaactccagacatcatctgttgatcattggtctctctcttttccagaaaccttctgtacgtatacccccagcgactgaacttcgctagcaagctagcatctgcccggaacatcacaataaagattcagtttatgtgcggagaagaccccagcaatgctatgccggtaagtagatgggtagtgtttgcctccagttgggtggcctgtgctccctctgccaggtcacagggatgaaatcaagagttgctcagcatacagagtacgtccaccacacacacccaaggtctcttggtgatgctaggccagggctttaccagtgagccacatctggctcaatacacagagtatttttgttccagcatagcctactcaacacatgcaggaacctttctggctagtccaggattgtccacaggaccatggtagtgaaacagcaccagtcttaagtctcttcccacattatacctttgtgaggtgccacaccttggaggtgatggtcattttaaaggactgaaaggtggtgtggggtctcgccacattgcccatagagcgaggccattctaacactgaagagttagagggtgacttggtattcattctttggctgaatttcttcaacacatgcacgtaggtgagcatgaatagagccatggagaacagtcctgaagcaaagcccagtgataataaacacgccagcgcaacgcctttgggaaatagacttgtatcctgagtcaaattataaattaataatacagactagactagtataaccaaagaggcctctaacaccagaatttcctagtaaatgacatggtcgattgctattactattcacacacatcctggaattcagctactattcagctggggttgtagctactgagagcatttgtttagcacgtgtggaggtcctggtttgatcccccgcagcacatggggggatggggagaatccttacgtattaagtgagagagggagaggtttgagctttctccttcacatcattttctggtgaagtcatttcttccttccctgtgtatctacttcctagaaagtccaccctctctcccacctcttcgctgatgcaaggtgacatcttgcgacagtggtgggaaaggcagaaaagagggtgcttggaaggagagaggtctggaggactcgcctagtcctctctgccctagccctggcaggccaccactcaggcttcccagtgtgtatgtgcacatcctgcgtgtggccaacgttctcagccaaaggacagtggtggtaaatgtaagccagttctccactcaccaagccctgggccaggtctatggttgctgcaagttcactagacagatcatgtaccatcggggctgcagcagactccatgagcttctgcatacaggtggccagggcattggaggctacaatcactcacatggctaagcccttgtctggaggggaaaagatgctggtgtctcactggaaacaaatgaatgtgatgtcatgtatatccatgcacagaggcagtaaagagacctctggctttccagtctcactagcctgtgcccttggtcactcattatccccttaaagccccagtttacccttcaacccacttctggtccatatggttgggccagtgataggacttagccttaacttataaactacagctctgggagagcagtgtcctgttggtgtggtagcacatgttcatagagccccaaattcctctaactttgttccttccatgttgacaaacaggtcatctttggcaagtccagtgggcctgaatttctgcaggaagtatatacagctattacataccataataagtaagtatatttcagagtcctgaacatatactacaaccatttctgtattccctagattttcggtttttaactccacaagtgctttttccaaaagtttttgcaacatggccacagagcagaggattttacgcctgttctgtgttgctaatgcataatttttataaatgactaaggctttgatagaatatatctatctaatataattctatttacaaaatgatgatagggacactttttaaaaaagatttattcattttatgtatatgagtacactgtagctgtacagatggttgtgagctatcatgtggttgctaggaattgaactcaggacctctgttcactctggcccagctggctccagcccatatatttattattatatgtaagtacactgtagctgtcttcagaaacaccagaagagggcattagatctcattatggatggttgtgagccaccatgtggttgctgggaattgaactcaggacctttggaagagcaatacaatgctcttaaccactgagccatctctccagccccgatagggacacttttataatgttaaataaagaagagtattttctcacttggtctgaaatccagagggccagaaacaaagccccaactctctatggtcatcttgtcatctgccaaccaaaggaagaatggtatattcaatcctgtcagtaaagtgagtcacaggactggctatctaacctcatttacacatcacagggaaggagggacatccctgtgggtttcactctgacctgataaccagactcctctaggggcttcctgtgaaccttggccaagcttgtcgaggagactaagtgggtgatgttgtaaagccttagcacagtccactgatgaggcagccacatgccaggcctgttgttgaggctgagatcatactcagaatctcgtcctcttcagactgacttgtgtttctttatcatgtagggaaagtcctttctgtgtaacaaagccttgacggtttcatgtaggtggaatgtttctcatagtatcagcatggccgcaaggccttaatggccaaggggcaggataaagtgaaataaaaagccccacagcatgcaaggcacatgggagcagagggtcggcaggcagcaggggctccgtctcgcacccagggactcatccttttgccgagagtgacctgcctacaccgtgcatctgatacaggtctcctgacttttacgaagaagtgaaaattaagctccctgccaagctcacagtgaatcatcacctcctcttcaccttctaccacatcagctgtcagcagaagcaaggggcctccggagaaagccttctggggtactcggtgagtcgctgtcagcgagctgcttccccctgcggttgctggtgcgcaccagccagggtctctgcagaggccgtgtgcagtctgctcacttgcttctctcctggggctgccaaatacgtggtgcatattacagcagagagtagaaacagctttacctagagagtgccaggctcctcccatggaaagctggtgggtggtaaatctctaaagagcatttaagaaatgaagcattacaatatctgttatttccaaatttaatgtaagtgcttcacatgtagaattagctcttcagaggggggggtgggagtttttttttttttctttaaaaaccatgtaaggtaaataaatgaacattggtaatcagacaggagctggcagtggccataaagaaaaaatgctactccgtgggcccagaaagcggcaaatcattggccttaccatctcagaaatgctcagggaatttacaactcagggaacgggacgcaaaccgctgccaggagacccggtcaatatctaatcattgtttagttttgtttgctggctgtgagctagataaatctcccgagtttcgtgcagccgtaaagccctctctgctcttgacaccatctgtttcagtggctgccgattctgttaaacgaacgtcttcaaaccggatcctactgtctgcctgttgccttggaaaaactaccacccaactactccatacattctgctgaggtaaccagcgctgcctggcagctgcttccgtcctgctgtggtctggggttcctttcccacacccacttcccattccccaggatgttactcgctgggttctccagggctgtcatctccaagcacgctgtgtttttctgagagcatgttgttccgacaggatgggaggaatatcttgctcatttagacgtcaccacaccagaatgttctgtaggtgcaacgtgcacctgtgctgcatggagttagctgcgctgcacagggttagggttctgtagatggggaggcagggtgaccccacttgtgacagacaccgtacttgtcaagaattctttcagaatgtttccaggcctgtaccagcaggttcctcttgtggtcacagccagatggatggactgtaaagatgccaatgccagagccagtgcccttcctgacctggctgttctggcttttgcaggctgtagcaataccccagtctaaagatagtcggtcccatggctcctagctccgtatcacatttctccacccgttagcagaggtctacatcaatgagtagtgtttttaagcagatcatcttactcataaatattttatcatgcatcttgaagatatgactctttctatcacaatacaatccgaggacctttatatttaatgtaatcttgaatatcaaactatctccattccatgaccacctttctagttccccaccaggaatcatgtttttatgctcatctgaattggggctcagatcactcatcgctcttccttgaattctgttgggttttaagttgaagaaatttccaggaccttgagtttagatagacccttcatggtctttctcccctgccattttctgataccctcaggttggccctttccctttgttccctaaagctgttccccttgacaccacaggctagcttaaggatggagacattccggctcatctttatgtcctagtcatacagtgtctcacagtacccctcacaacagcttttgcagagccaagcaaggtggtgtgtgctgtaatcccagtctgagtgaagttggggcaggaagatcactgagtgtacgacctagtgagccattgttaaaaaaacaagaacaaacaagaagacgtacacacacacacacacacagctgattttcaatttttaagctccaccttccaatttaaaagaactcctgtattgtgttgtgtggtgttttgttttgttttgttttcaaaagcatggataaaacctgagtttgtgttgttgctttgttgaattttttaaaatgttttttaagacagggacttaaaatatatatagcctaggctgtccacaaattcaccaagtagccaagaacgactgtgaactcccctgatccccctgcctctgcctctctacaagtatgcaccaccacgccaatcccaacctgagctttaaggcgaatccaaatcccaaataacaactgtatgagtgtggtcacactgctggcatgtaatgagtgtggtcacaccgctggcatgtaatgagtgtggtcacaccgctggcatgtaatgagtgtggtcacaccgctggcatgtaatgagtgtggtcccaccgctggcatgtaatgagtgtggtcacaccactggcatgtaatgagtgtggtcacaccactggcatgtaatgagtgtagtcacaccgctggcatgtaatgagtgtggtcacaccgctggcataatgagtgtagtcacaccgctggcatgtaatgagtgtggtcacactgctggcataatgagtgtagtcacaccgctggcatgtagtgagtgtggtcacaccgctggcatgtagtacaaagcccatgataaaatgtttatcctctgattctcaagggtaaaaggaagtccacatccgactctaaagtgcagtgagcattaactgagctggttcttatccagcaggaaatagcgttaaagtaaatagtagcttctttttcctacctatagactcaccctcagccctcccctccccattgctgttccctgtcaaatacagcagaagcaagtggctagcgagctcttgaatgggctagttctgacgcagcgctgtcagtgtaaaatatgagctgaatttcgaagacttggtattgaaaaaaatctattttttattaataatttatattgacctgtcattgaggaaataggccatactgtgttaaatgagatagtctgctgaaattgccctccatgttctttaatgtggcctccctaaaacttaaaaaacttgggctggtgagatggctcagtgggtaagagcacccgactgctcttctgaaggtccagagttcgaatcccagcagccacatggtggctcacaaccatccataacaagatatgactccctcttctggtgtgtctgaagacagctacagtgtatttacatataatgaataaataaatctttaaaaaaaaaaaaaaaaaaaaaaacttgaggccagtgaagtggctcaatgggtaaggtgctcgctaccaagtttgatgacctgagtttgatcttgacgtccaggatcctcatggtagggggagagaaccaacttcctaaagctattctcaggcctctatgtgtgcatatacacatgcatgttctctctctatagccctctctctccaatgaaaaagtaatgttgattcccgttgggtttctattgaatgtcactcctccagatcataaatgcgaacgaactccagtgtctgcaggaatccagcagggcgcataagtgaggctggtcctggtggaacgtttcactctgggggttgtgcacaggtttcaaaggctatggctgcctctgttccacagactggcaccgtgctgggagatcttccagctctcaagtcagaaatgagcctgttggggctggagagatggctcagcagttaagaggtcctaagttcaattcccagcaacagggtggctcacaaccatctgtaatgggatccgatgtcctcttctagtgtgtttgaagacagctgcaatgtactcctataaataaaaagtaaataaatctttttttaaaaaagaaatgagcctgttatatgaacgttgctggcttttaaacattaacaacccatttacaacaggcccaataccctgtgggccaactagagctctgtgagcttgggttccagcttgtgccattcagagacgtccatccgtctctgcccccttgcctgtccttacaagcataacatgcttcctgccatcatgatgaaagaggcgcagctcccgtgctaggccctctttgctccagcaccctctcatctctctagaggaacatagtaccgatgggaggtcgagagaggagttatttctaagacctaaggagtaggtatcggaggatgcataatgagcatgtgggagccaagcaggactgccacttggaaacactttgctaaaagggaagtcatttctggcattcaaacccattcggagtcccagtctctgtcctgatatctctgattgataggaagatcacatgactccattcgtagcctcaaagaccttcggtgttgaataagaggttggaggtagatcacccagctaactcttccaccatttgaacaaatgctaaggccccgtgtgtgtgtgtgtgtgtgtgtgtgtgtatgtgtgcttatcagtgtgaaaataacaagtgtagacttgaacttgagacaaaggcctctgactcccaagtctagctatggacgttctccatctgtagagccttgccattcctgacatgttgcttgtaccgcttgctgctaacagttgagaagggaaattgcattgctaatctttctcttcctctctctttaacacagaaagtccctttacagaatcctcccattaagtgggccgagggccataagggggtatttaatattgaagtgcaagctgtttcttccgtccacacccaggtaagggacatcaaggtctgccaccgtccgggttagccatctgctttgtgctctctcttgacagtgtgatacctagtacatcacctacctacagcatgagttggagcctggtttattgtttctttaattaatagttgtcaaaaggtcctatgttgtataccacattctacaaataagcccactgcctttgctggaagcatctgagatttcgagttctaatccagagcactggctaagggattgcaccaagctcctgggtggatggtgaaagaataacacctcctgagagtcttccaccctctgccctcccaggataaccacctggagaagttcttcaccctttgccactccctggagagccaggtgagcttccctatccgtgtgctggaccagaagatcaccgagagcacgctggagcacgagctgaaactcagcatcatctgcctcaactcctcccgcctggagcccctcgtgctcttcctccacctggtgcttgacaagctgttccagctttccgtgcagcccatggtcattgctggccaaacaggtagaggcctgtgggtagggaggaggcatggctagatcaggcgggcgagtgggcaggcaagcaggaaggcaggcagacaggcagcaggcgggcagacaggcagcaggtgagtagacaggcaggcaggcagcagacagacaggcagacaggaagcaggcaggcgggcaggcaagcaggcagacagataggcaggcaggcagacgggggggggggggggggggcaggcaagcagacaggcagcaggtgggtaggcagtcgggcaggcaggcagacaggcagtaagcaggcaggcaggcaagcaggcaggcaggcaggcaggcaggcaggcaagcaagcagacaggcagcaggcaggcagatgtactttgcctaatgaatcatggctattcacagacccacaaatgctgggagcaacttttgcaacacttgacatgaagacaggtccggtactgttttgtcagactccctacatgtttacaaaaaaggaagaagggctggagagatgacttagtcgttagaagcacttgctgctcttgcaaaaggcccaggttcagttcccagaactcacacagttcacactgtgtgcatctccagtttaaaggtacctgatgccctatttttttcaattttttattagatattttctacatttacatttcaaatgctatcccgaaagtcccctataccctccccctgccctgctcccctacccacccactcccacttcttggccctagcgttcccctgtactggggcgtataaagatttcaagacctaggggcctcttttcccaatggtggatgactaggtcatcttctgatacatatgcagctagagatacgagctctgagggtactggttagttcatattgttgttccacctatagggttgcagaccccttcagctccttgggtactttctctagctactccattgtgggccctgtgatccatccaatagctgactgtgagcatccacttctgtatttgccaggcactggcatagcctcataggagacagctatatcagggtcctttcagcaaaatcttgctggcatgtgcaatggtgcctgcctgatgccctcttttgacccccacagatactgcactgacatggcacgcatgcatacatgcaggcaaaacgctcatacacatccaaaaataaataaaataagtattttcaaaagtgtttttgaaagaaaagcaggggactagagggatgagaaagaaggagagagaaagaacattaagatgggctcttaggactgatgagatgctcagcaagtaaagatgcttgtctccaagcctgagcgatgccatgaattagatgctcgagatccacatggtagaaagagagtactggcttctagaagttgtctgaactcaagatttgccccatgacacacgaacacacacacattaaaacgttttcaaatgtttgtggttcaggtacttggtggtgagacttggggctcactggccaggcctgaatcaaaacaatatggtggagaacaattgagggcaatctgccgtcagcatctggcctctgcatacacatgcatacaggcacgcacgtacacaaatatgcacatgaagacactgaaggacttagtcggcagccattcatttggaacctgcttctgctctgtttagtactatggaaggcacaatatgggaaggaggaggcacaaatgattgtgagaaatgcactaggcctagggctggtctccagccttcatagggaggctacatttaccaccaggcatagctgcaaaatgatacagtttggcttcctatcactgtggggcattgcaggcttcgtgcaggagtctgagcatggaagggtggtctttgtggtcagtgtaattttgtagcaagaagcaaggaagtcactccaggtatggaggacagcatgagaaaggcaggaaggaggaaggatcacagaatgggatgagctgatggctacctcattaggacatagctggatctgagcagaaacaggcacaaagttggctaaagccaaattatgatgagctaggagcaccagacaaatgaggtatagacagtttgcatggccctgctgtggggaatgacataacctgtgtatgttttaaagatgtacctctatgagaatctgttgggggacagatttatgcattgctctcacatctgttgggcatcctgttaagatgcagattctagttcagctggtctgaggtagggccaaaggctcaagcccaaggtgatgctgataatgtccatctggagaagccacccagttttcagctgagtttagaaagtaatggcataaagacatgggtatgtcttgactgtgggaaactgtgtcctttgcagtggggagaaaaaaaaaaggtgtaagccaggcatggtgggctatgctaccgtacctataattctagctgaagcaggaggattgcagtgagttctgggccagcttgagctacacagagggaacttgagaatgtctgtagtgagattatctggaacactggatctggctagaacacacctgcctccatgggcgtttcttttgcctggctaaggtggtcagtgatcgagacgtgctattacaagcctgagaacgtctacctcagtttctcttctcttcttggctcctcagcaaacttctcccagtttgccttcgagtctgtggtggccattgccaatagcctgcacaacagcaaggacctgaggaaggaccagcacgggaggaactgccttctggcctcctacgtgcactacgtgttccggctgccggaactgcacagggatacatccaagtcaggtagtgcttcctggagcaggggtagggatggggatggagatggagatggggataggggcaggtatcagcagggtaccacgtcagaccactgccactggattaaaggctcagttttggttttcagagtaaaacttgtatacgtgctgaaattaaaagtttgtagatgctttgccctctcttccttcctccctccctcttttttatgttgtacttactatgtctgcctagttggtaacttctcagtgattaccccactgccaatttgtgatccacttgagggtctgctttaaaagacggcgaactgtcaactgtaagattctagaataacagcaaggaaaacacaacctatgccacatcagtgacaccattgaaagttcttaaacttttcatcacataaaatagtcttcattcccctgaactatgttaataataatccattttggtattcttcttagttatttacgtagaccataaaccacaatgcctgggtagcccggtatataaaaatatcatcagtagactttttttttattacgtattttcctcaattacatttccaatgctagcccaaaagtcccccatacccccccgcactcccctacccacccattcccactttttggccctggcattcccctgtactggggcatataaagtttgcgtgtccaatgggcctctctttccagtgatggccgactaggccatcttttgatacatatgcagctagagacaagagctccagggtactggttagtccataatgttgttccacctatagggttgcagatccctttagctccttgggtactttctctagatcctccattgggggccctgtgatccatccaatagctgactgtgagcatccacttctgtgtttgctaggccccggcctagtctcacaagagacagctatatcagggtcctttcagcaaatgcttgctagtatatgcaatggtgtcatcatttggaggctaattatggaatggatccctggatatggcagtctctagatggtccatcctattgtctcagctccaaactttgtaactccatcagtagacttttaaaaattccacatccaaataaatttggcaccttttaagtctctgcagtcataatttacataaatctgtagttccaatccaatttttaaaccagagttggacttcctttgaaatattgcatctgcctgtcctcaaaagatgactctgggtgactcaattctgaacaactttcctccaaaacttacaagacttgtgtcattcaaatattgagcacacaaaaatatttgtgtttctcgttttccttgagaattcagaaactctggcaattggtgacagactagtaccaagtgtatgcctccagtccccccacagccctccccactaccctccacctcacaccctgcccctccgagctgcagaatactcaaggccccatcttaggttcacatttccccaccattcctcccttagtcagtctttcttgagctccgtaactgactctgtcctgtctgttgacatgtctctggctgctggggtacaggtggccccaccaccgtagtccccgacccccgataccacacatatggacgcacatctgccgctgcagtgagttcaaagctgatgcaggcccgtgtgatgagcagcagcaacccagacctgactgggtcacactgtgcagccgatgaggaagttaagaacatcatgtcttcaaaggtagggatgggggtggggagggggcacatgtactcttgttttgcttcttagctgatgtctactgtatgcacttctaggtacagcttgatattttgatatgtaagtattttgtatgttgatcaggtcagggtacttaggatgtttagcaccacatacatccatctttccttggtggttagaatgctaacatactctttttatagagattttgaagtatttgagaaagagttttgaccattgatgttttggtgtagtaccgtattaaaacacggtggggcactgttctcatatttttttcctgctttcttagcacactaaaggaactgttggtacctgaatctttttggcgttgttttaacttggggttcttttaagacggggtttctttgtgtaaacctgactctcctggaacttgctctgtagaccaggtttggccttcaactcagagatccaccagcttctgcctcctgtgtgctgggattacagtcatgtgccaccactgcctggttcttttaggtgtcttgacatagtgtctcactctgtaacccagattagcctagaatttagtaggtaactcagaccaaccttgaactcacggatattctcctgactcagcctcccgagtgctaagtttacagttgtgagccaccatgcctagctaggtactcagttgccctccatcgactttgccaaatactttcataaaacacttatttaacttgcatgtagaagcatttctgcatgtatgcatgtatgtacactatgagcataccgtgtgccagaagataccagcaaaggtgtcggttgtgagccattgtgtgagtgctgagaaccaaacccgggtcctctgcaagaacggcaagtgcttttgagcatcacttcagctctctacctctgtcgggtgctttgatggtacttttccagaacggaactattagtgtggggtggttattttgtgtcttgtctgtttgtttaattgtccatattcattgtacatgcgatggttttatagtttcaagtagaccgagtacgtttaccctcacccctcaatgcccttcactggtccccttcccttctgctttcattttgtatgcatttaatggactcaagtgtccctatacaacgtgtgcaccacaaaccagagaacgcatgcaatatttgtctacgtctggcttgcttcacttaacatgatggtctcccagtatgcccatttcctagcaaacagcataaccttgctctctgtgactgaataacactccgttgtgtgtataaaatatcttctctacctctttatttgctgatagacacttaagatctttccatagcgtgactactgtgaatagtgatgcaataatatggatgtgcacatgtctctccagtgtgtgactgatagcctttcaggtacctagccacatatggttggctgggtcagagggtagtgctatttgcagtgcctgagcacccaccatactgatttctataaggattggacaatttacgttcccaacaaggagtctgtccaccttcactagcactttattacaactattctcttttccgtctttattaattatttgagaattttaggcaggccctttcatgatattcacaccaactcttccaagatctatctctctgcccacaccaaacttcatgcccttactttctggtggttgttgttgttgttgttgttttctttaataacccacagagtcaaatttgtgcagcctagatagatagatagatagatagatagatagatagatagatagataatattatgtattatatattacatatataatacacacactcatggcccagggtcatccactggagtgtggttgacctacccgaggccactcccagaaagaaaactaactcttgcccccaaagccagcagctgtccatagctcctcatagaggaactcatgaaccacacccttcctataacgatggctctcctcagtgagggtgagatataatcagtggctgtttcattaatgcttttattttcctcttttttttttctggtgggggaggatctgctgtccttactctatatatgatattcagttttcccagccccacctaaagaggttgtgtttatccagtatgtttcaggctggccttgaactcctgacctacctgcctccacttcaagagtatcggagttgccttttcctgctggctaaagatcccacatatgtttcacgtgtttcttggccaactattcttcatcttttgagaaccatctgttctctttattgcctgagtagttccattcttccatatttagtgcccttagtatattctaggtattaaccctctgtctgccacaggtttcccgtgggccgcctctcgttgcctcctttgctgtgcagaagatttttcgtttcacgcaatcccattcgccagttcttggggttctttgcacagagcatttgctgccattttgaagtgttttctctgtcttacactaaccgtcttggagtttcttacgttgaactcttccgcccgtttttagttgacgctcatacactgtgagcaatgagagatgaagatcaatttccttattccttactctgtatgtgatgcccaggtttcccaggccgcttactgaagaggctacttgtatccaacgtacatttctggcatctttgtccagcttcacgtggctgtagctttgtgagtttaattctggctcttgtatccattctattggtaaggctttctactgagatttttgttgttgtctgatttattgagatcttcattcccaaacttcagtttattatttttcatcatttctacattgctattgagttctctttcctatcccctattgacttccttctttatacaattgtttagtgctgtctccttaaatctatttagaaatgtacttgtgttgtccttagtgtcattgatcattcttataaatagtctttttaaactcttctgggatctcatcttatttccttccattggaatccgttattatagaactggtcatttttggaggagtcatgttgctttgatttttcaagtctcttatgtttctgcagtgggacttgtacatctgggattacgtcatggttggatttgttgattatctatttcatttaaaatattctaatatccatcctccccgctagttgttaaatcaaatcctcacagcacatgtttagggcattgagcataacctacagcaagggaaaaaaatggtctttgtgtgacttgtacgaacacaagtgcagattgtctctatgtagctagctatgtatggaagcaaactggctttgtggtcacatacctggaagctggtgcacagtaccttgatgcagtcgcttgtctgactgcaggtgctgatcccatccctgtgtagcatctcactgtcccttctctggtgtatgggttttgagccttagcaccctgtgttgctgcgtgtttgtttcctacatctatcttttcgttgtttgccacacagcctgtctggtttatgggccatgtagtgagtattttaactagaggagtctttcagtcagtgggtactggaagggactgtcaccaagctttctcctggcactcaccctagtacctttaagcatttgctactatgttggaacaaagagctctacagtcccgtttactttagacaacatggtataagatgggtggttgccatggaccaaggtagctagctaatgctgggcatctgagggactgtgagtcagcgcaagatggctagcaagggatgtccagggaacttagaagtaagtggtgatgctttttagcagaatgatacttttatgtcactctgtgtaaatatgaggacttctcttttgactttgctttcaccagcctgcctatatgtgtgtgtctgtccataggcctgtgtgggtgtctgtccataggcctgtgtgcctaccttcatgtggcccctatgcaggtttgcctttgtgcctgtgcctgtgcctaagtgtagcccgtgtctgtcactatgcttgggtgcctgcagcagctgcctacctagcatggataacatgcatcttatctgtcagtcacttcagccctctggcctcctaggactctcctctttgccccaccccacccccacaccaagtcttggtcctcacacactgcttgtacactcctggggagctgatgactctcactccagactgtggagtttcttccatgtagaactctgcctagttctgagtcttcagagtgagctatgcagaggacaggcctgtaagggtcccttgcccctgactcccagcagtctgcttaaaatggcttgtctctgtgcatgtcagcttccaagaacagagaattttcctagaaccagtctgctgtacacagcacagggtttctgtctggactgcacatgctcttggcgctgtgtcctgtgttgattaagctttttgaagctcaggtgtccccttcttcttagaactcaatctctcctctttgcgggtacgtatttgtctcccccaacccttcataaattacctggctcttgagagtaagagaattttcctggctctctctttatcttaaccccaggttccgacttgctgggttactctgagagtagagcacttgccagtcaggagcacttccagaatgacctctgaactctcccctgttctgtttagtgagcggtctttcttctttgtcacttaagctagtgtttgtttgtttgtctgtctgtttgtttgtctgtctgtctgtctttgtcagcacccttgtaggatggccgctcaacaagcaccccgctttatcccctaagggaatccagtagtctccgcttgggttttaccatcctccctgagttggttcctgtgtttcaactatacttaactccatgttactgcacatcaatctattaacagcaactatctcaggaacaagtaacatcatttactttctttgcttggttttatatttatatgtggctgttattttatatttatatgtggttccagtacagaaaaggcctaacatagaatcaaaacgaattctgcggttgtgatgtccaggaattttcctcatcacagtttgtatgtttcagattgccgatcgcaactgcagccggatgtcttactattgctctggcaatagtgatgcgccaggttcaactgcagccccaagaccagtcagcaaaaaggtatagaccggggcggaataagggtaatctcagcccgagaaaggactcactggtgtcttcatgttacaactgaaaacagacactaagtgcttgctttctgtcccctgcccagctaacatccacacatccttaacaaaagcaagtggcaaaattaatattattttaacactatatgaagtaatatgccttcttgactacgtgttttttggctgagaccaagtgcatccagaaagaacctgagccattcctcaaggttgacctgcaaccctcctcaattctgagttcagaaaacatgcaaagtaggggattcctgaaaccaacaaaaccccctggtcaggacagtgagtgtggtccagagagacataggctatcaaaccagttgtctgtcatgtgtccctctctgctaggcatccaagaggttgatgtcatgattaccattcaggatccttaaagtgcagatacactaactgcagttatacatgaagctgtttgcagtccccaacagcacggaaagattttattacagacaaggagagcatgcgcctcgaatggctgtctttggcctggaggcgtgaaggatagggaacgggaggtggcactgagctgacgctgtagaccgtacagtaatccaggctctagatgtcggcaagatcttccaggtgttaactctgagagggaaagtgacaggaacttgtggttaggcccaaaactaacttgtcacctaccctaacatttagcattaggctgtcacagccactggtcccaagttctgctttcctttaaaaactgtattataaaaggctgaacatgtgacacaatccttagcccccatcccccagtactggagaggcaaagagatctctgtgagttcaagccagcctgatctgcttagagagttctagaaaacaagagctacatagtgagtcctgtctgaaaataaaataaaactgaagcaatcagcatatttgcctaaagtccgacttccttagtgtacatcctgtttggttttgcggttggcttgccttgacccggaatgaccaggagggagttggttttatttgggggggggggagttagccagtgtgttgccttcatagcttagcaaccgcttttgctacttgcctgtcttctctaacctctggagcaaggtgttcctacactaacactgtccagtaagcaatgtgaattacattgcgaagcagcttatccttgtgtaatctcttcctgccctaagactctggcagacaggctgacctatttctagcggctacctccacggctggtggagcgtttccttcttcccatgggagggtggaaagggcagcatgctgtcatgtgcctggttggcaaccagtggggttaacactcaactccaacccctcccagatggcacagcctcacttaagactacttcagcaaacagatgtgctcccgtgcactaagataactaaggtttaaactaccctatagaatgggtgaaaccagccaatgagcagaacttaaccgcagaaagtagtcggaacactgtaacatctgctcagagatttctccgtttgtctccttccgatctagataagtagccctcaaattaaaagtctataagagctagtaaatgccattgtgagtaccccaatcctgtggatggtttaaaagtttgtcatttgcaatcattatcaccattcagtttttgctttggactgactttgaaactaacttccacacaaagatgtgaaatttgagtgttgaaatagttctcactctcctggctgcggaaaaaccacagaagagtctatctgtgtgcgtgtgttctaggctttgcacacatgtgtaagatgagtgaacgccaaaagaatcctggccattgcttttgcctttagttggtatggcactgtcttgatttgcccagcaccgagcaggtcccccaagacaaagggagttcgttctattttgagagcatagaagtatcaagcaaaccaaaatgagttattagttttatttttgatcctcagcttcttccctttttcccctttaaaaaattttcatgtgtgtgtgtgtgtgttgtaattcagagtttcactcataaactcatccatgacatttccctcatgaagcaataatgggatgatgcaaagacttgtccaaccttgaaggcatctgaatatatcatccagacagtggttctcagagtgtggcatcccagtgccagcaggagcttgacagaatgcagatcctcagcccctgctctagaccttctgcctcagactctaaggatggcaccagccatctgagtgttacttgaggatcatagcgaccaacaactcagttttgtggaagagcaaactaagagcagagagagcaaacgcattgtgtggttggtggggctttgaaagtcctttctctctagcatataccaccagtaccacccaggagagctgctccacatatgcaactgttattgtaaggctggggccatggtgcagtgccacccgctgccctcctatgtgttatttctgtactgattttgccacctgtcatggcctggggtaccttggacacaagcctctcagctgttgagtcagaagagaaggaaagagggtttagtgggtattaatcaaccttgccgtcacagcctggttcttgttggtttgttgtttagcatttccatgaggagcttgccctgcagatggtggtcagcactggagtagtgagagaaacggtcttcaagtacgcctggttcttctttgagcttctggtaagattcttgtgtttgtatctatgctccggctgggcgagcaaagcacgcctggggaaggcagagtttcctgtgtcaagacctaatccgaagcctagggttgctccttgaaatgcagctgtctctcatcctccatccatctttcaccaaactttatcgactctaccttaaaagtcaacccccgtctttgtatctcctcatggttcccacttgaccaagccaccattgttcctcatgtacttcttgaggtatctttgctctcagtccatcccgcccaccccaggcagccagtgtcatacagactgtgtcagcctccttgtggtcttcagaatactagaagtaaagtgccatgaaaagaaaccatagctaaaatgtccttgtataatcctaatgtgtacctgtgtctcatgccatggtcccctcatttagccacattggacccctttttagttcctaaaaaataccaggcctggactttttaacctaaagcctttttaaaagtttcctctcacaagctaccttttactactcaccctcaacacactttctgctctgtctcctggcaccacctcctacagagcccttctctggccaccatactcagtaatggtgtctcaactttactagcctcctcttggagcccccattcactccttacgagcactgtatgcaatttgccattgttttctgtcttacctactggatttctaggatgtgatccgtctttattactcaacgcttgatatcgtacaagcagtaactagcaagactaacagtggttgggaggaatatggaatctgtatatctatttacctacctatggagtcagtctcccagcagaacagccaagggtacatttattgctcctccatgttatcatgagaagagtgccgatacctccttctacttcactattgacagacatggaaagattttgtcataaagaccattaagaacagaggctgggaagatgatgactcagtgggtgagagcacacatgctctgcaagatgcgaacctgagtccgaatccccagagcccacatacaaaactaggcggggctgcatgtgcatgtaaccccagcattggaggacagataggtgggtgccagaagctcagtggccagccagcctagccaactctggaaccttctggttcagtaagagtccctaggtgggggcaggaatggtggtgtactcctttaatcacagcactccaggaggcagaggcaggaggatctctgtgagttcaaggccagcatggtctaaaaaaatcaagttctgggacaggcaacagagaaaccctgtctcaaaaacaaaacaaaaacaaataaaaacaaacaaataaaaacagaatccctgggtaataaggcagaaagcaatagagggatatagcatgtagtttctagtacccctctttaattaagctctgggcagatagcactaccagcccctgccctggttctcttggatcctccaatgaaaggcacacacacgcacacaccagcttatttttaatatgcttttagctcaatggctgggtacttctaagcctcccttggctagcatgtccttttcctcatgcccagctcaacatctctaaatctgccctcagcttagttgcatttctaatcttgcctgctaccccaggcccagttggggaagcagcccgatggtcactccctccaaagcatggctaatctctcttgcatctcctagcctggcttttgggaatatggaagtcctgcctcttctacccagccattggccactagtatcttgattgatcagtcaagaaccaattggggaacaggaccttcagcattctcacccacacattccccatcgaagcatcagaaccatcctcctacagaggaagacatccaaaacccagtccttcgtgtttactgggttccttcctctcacactaactgaagaatatgtttaaggaaaaggagtagaattcctacctgagctctgtttcctccattgaaatccgaggcagagaaaacagcaatgctgaacagacagaaagaaaagggccaaaggaaaggaagataccacacatctggaggaagcaaggcatggcgggcagcagagttaagaatcttgtcttttaccatggaaacagttttaatccctgagaggctcagcgtcccaaggcctagtctgaggatgaccccagtgcactgactcagatcccacaatcccatgggagcgtttgatagaatgaatgagggtcctgttgggagtggaggaaactgtacgtatgtacctgtcttcctagctgacttcaaggcacacctacagtgtgctagtccccaccacctctattttgtgagtcctaaccatagctacagggctctggaattttgaccaattcaacaccagatcttaatcttcaagccaagctggttaaggcctgtggctacagcttgctagcctttggttaatagcatcatggtatacatgagctctgtggtctggcacaaaatggactggtaacaaaactcatcccttttttttttcaggagacacagaaagtattttttttttttaatgtctcgaaaaacaaaacaagcaaaaaacctgtcctgtatgtcctgttctgcccgccgtcaagcttcccctcagagaagatccacttgggccatgacccatctatcaataattcataaaataatcccaaattcaagtcaaaattgcagacgggggggggggggaagaactaaatttgccttagtgaaaggtgtcctaactattaactcgcacatttacacacacttccttaaccactcttagatcttaggcaacaccctgcttgtggaaaaagcaccgagatccctagggcagggactcaagcccaacttcatgagggatccggtagcaactctgcgggctctcaggtccatccttgaatcctgtgagaacttctcttctccccataacccgcaccagggctcgagagatacgccaccttcctcagctggggacaggtggagcctccttctctaactctcaagtctaggttctttctgttccctgttttgcctcttggagaagttcagagtttaaatgtctcagtccactatactgactgacagtaggctaacccatgccatccagttagaacattgtgtgacttatttggttccccgtcatcatgagctcagcttgagtggttccaaagagcatcttgtagctccattttgaaggcaagtttgtattctgggaagaaataacattgactctgtctgttgagtaacgtcagtagcagttggcacccctgaaaaaagaaaaataacatcctaagtgaattgagcatcttacttctgcatgccagctattgtcttacatatttttaaagcattgtctcgtttaatcttcctacagccttgactccaggtctttgtgattctgagtttgcaggtggggttagaggaagaatagccacagaagagcccccagatctgtctagggttggtggcattacttcattgtgtatgactacaaggagctaagaatgacagagaaggtgaaaattgcttctaactggtataattgttcacttagacttgtttggcccaagagaaggggacatctaaagttaatatgtccctcttacctctaggacccccttatgctacacagatgacatagtttagagaagttcccatggatcaaagcactttgatggggttggtccaaatgcaggcccaccaggacagcagatacacagggctctacagactgtagcctctctgtcagctgaaaagcatttatcacaaggcctctccccagggtgtctgaggtgatgcagaagccaataaagactagagagacacccagggtgccgcagctgcctgaatcctttggttacctagcctcgtttgttctgaagaatcacagagaaggagcaggcattcagggcatagagaaatctagagacagagaagaggatccgctccgcaggggttggagccatagaaaaacgtttacactgccaggactactcagtggcagcaggagtgacaaatggctaaacagttcaccaggagctacagtctcctggtcaccagtccagccagaagccaaaaggaaaatagggaaggggccattgctacagtatacagacacctcctgagcattcacacacggagaagggcaagaagccatgtgggggttgggggctgtggtgggcatagaacgaccattgatctcagacccaggcagcaccttagtcctccgtgcactgtacctgaatggtgctcagaaagcctgaagaggagaacaacttctccttggcagcagaggggcagtttgacacctccagctgtgctggccaccgggtgctaatgaacaataactttgtcacaggagccagtacacttagtcctcgggttcgtttcacacattttaatgaatgagccctgtgcagttagaagtctctgattcagaccttggaggcttcgaggtaaataggtgacctagttcacttcctccggacatgccatcctgcacgagggggttctgaaagttgtcccttctcagaatgggccacagaggccaatgtgggagagattctttttctgtccccaccaaaccctacatatgggtcaagccccactgatatttttgctgggttcttctgtgaggacccagggacacaagagctggcaggttgctggcagtctggacgccggccatcagtggggagtactattgtgagaattatttatttggttgtgggatggccaaactcagcaggcaggagccgaatgtaacaataagttcaacaggctggcgctagggtgggtcagccagccgaggatggggattggggtcacctgcacaaagagcccttgtcttccctggccctaggctggaagtacagtgagagagatacttttgtctaacaaaaaactgcaccctgttcctacccctcgttcaggtcgtctccctgtgcgggtgtgcatctccgggactatgactatgtctgtgtgacctgggctagaagggacctttaggttaggaaaaaccatggttcttacattggcttttctgtggttgggtctgccctgagctagtcagggcattatccgaaacatgtatcagaaagctgcctctgtccttccttcttgcattgccctctgtgtttgcaccttgtttgtctcggccttgacaggtttatgtttggagaaacagaactctgctgtcagtgaacaaagggttccattttgctcagagtggaagccagtttccaagacaccagatggggcagatgtgggtgggtcagcttcaaaggaaattgcttttctgttgttggattgtttacttgcttgtttgtgtgtgtgtgtgtgtgtgtgtgtgtgtgtgtgtgtgttacttgcttgtattggctgatgtttttgcttgctggctttgaggcagggtctcactttgtagccctggctgacctggaacttactatggagaccagtcagactttaaactgttagtaattctcctgcagccagccatctcttgggtactgggattacaggtaggtgccagcaggcccagctgacaattgctttttgctgccatgctctaactagtctgtacaaattcatgaatatgatttcaggatgtcagcacacagccatgaaaaatcccagtgtagtggacacttgacctatttctctgataaaatagtctgaggaaaagaaggaaggatgggaggggtaagggagggaaggagggagaaaggaaggaaggaagggaggaagaaggaagaaagaaaggaagggagggagggagggagggagggaggaggaaggaaggaaggaaggaaggaaggaaggaaggaaggaaggaaggaaggaaggaaggaaggaaggaaggaaaaaaggaaggaagacggacaggtaggtttatattggctcacagttcactgatgcagtccatcagggtaagggtgtcatggcggcaggagcatgggacagctggccacattgcatcagcggtcagcaaacagacagttgactgatactgttctcagctgccttttcccattttgttcagcctggaaagcagccacagaacagtgctactcacggcagacaggacctcctcactccagttaatctaatcctgcccagaggtttggctcctaggtgattttctgatcctgtcaagttgccagctggcagaaactaccaccccaatcttgccagtcaaactatcacaaatagctctcagcaaactcacccaactgtaagactccacctctggtgatgtcaaaggatgacgccagaatctcctggcccaggaggaacccaaaaattatacatgatctagattttaaaatagtaggcataaaactgttattatactagctaccagttgatcaatagattggttaactataagttaggcttaaaaaactcaaaacataattttccctagaagatgagccaacatgggcttcataatgagactcatctaaaaacacgtatttatatccttcagaggcaacattctatataatggttaaatttctagatagccaacaaaatcctgatcattccatgatatagtttgcagtttaatttctagaagcagagattaactccctgtgaactatggaattgctttaggaaaaaaaaaagtttgatttttttaaactcaatataggaggggcctttctttcttgttctccttactgtttcagggaaagaaaagacaagccaagacagcattataaagtagttcctgagcgtcttgtatcatgtactgtaacagcctatgtgcttctgaggatccagcctcactctgtctccaggatggaggctgtcggggaggggggtgtcttctgacaccaggctaatcagttaagcttcaggttttgccagcagcatgaaaggagcccctgacttgggctcaagaggaggacacactgcccacctccagccaccgtggcaaccattccatgcatcagaagcattttctagttcagagccatcttggacaccatcagcaccaatcaggaagtccatcatgaaagatttccttcaagccagtcagtccccttttgtatgttgtacaatcgcatcaccaacctctgtgctgacattgtcccattcctccgtaggtgaaaagcatggcacagtatgtccataacctggataaacgggacagttttcggaggactcgtttttctgaccgcttcaaagatgacataactaccattgttaatgtggtcacctcggagatagcagcccttttagtgaaacctcagaaggtagctgtgtgattctgatttataaattgtttgccttgactgaccgtgttacagaacaaaaataaaaacctcatgggaaaactagttaaaatataacaccagttaaaatatgctggcctattctccggggtgtggctggagattgctgtaaagactttgcaatgtgattggtcatttaaatgattttatcagagaaaacactgctgctctcaagaaattcggtctgcagtttaatggagtacatagtggatatttgccacctacttgaaaatgttttcaaaaacacatttatgtacagaaagaaaaataacaatggtttgtaaaatgtaaagtattgatgtgtagggtatgatttttataccaatctttaacttgaaatcattccacaattaaaatgtaaaaacatatgtaactaagaacgccatgggccagcagaatggctctgagaatagagtacttgttaccaggcctgagggacctaaattcaatccccaaaacctgtgtggtcaaagtggagaaccagcccttgcaattgtctcctgacctttgcatattcgccataactcatatttatcaccgccacacaaatatatgtaatttagattgttttatttatttatatttattttatttacatattttgatgttttatttattttatgtattttatttatttatttttgagacagggtcttactatatagctctgactgtcctggaactcactatgtaaacatctcataaataagagcactgtgaaataagaagaaaaataaaacagaaaaatcatacaaaaacaaaaaattagcctggcttcgatttttgaaaaaaattcactctcccaagtatgactctaacatctttcagaatgagaaccttgcctaattggaaaagaaaaaattcctaagccttcttatcctgactggatttttaaaaataatccttataaattaagacgctatctcctgggagctggggggtggctcagtagttatgtgcacgtgctgctcttacagagaagaccaggattggttctctctctcacacacacacacacagacacacacacacagacacacacacagacatacacagacacacagacacacacacacagacacacagacacacagacacagacacacagagacacacacacagacacacacacagacacacacacagacacagacacacacacacagacacacacacagacacacacacacatacacacagacacacagacatacacacccacagacacacagacacacacacagacacacacacacagacacacacacagacagacacacacagacatacacacagacacacacacacagacacacagacatacacacacagacacacagacacacagacacacacagacatacacacacagacacacagacacacacacacatacacacagacacacacacagacacacacacacacagacatacacacacagacacacagacacccacagacacacagacacacccacccacagacacacagacacacacacccacagacacacacccacagacacacacacacaaagacatacacacatacacagacacacccacagacacacacacacaccaaaagaaacatgtgatgtcttatgaatactcactcatacacataaaataaataaacctagaatatgttttaaatctacttctttgaagatagtgaaagcatttcaagttagtctgcacactccaccccaaccaaaaaaaaaaaaaaaaaaaaaatctttagccagaaactgagtgttggtggcgcacgtctttaatcccagcagtagaaggcagagcaggcagatctctgagtttaagcctagccttatctacagagtgagttctaagacagctaggactacacagagaaaccctgtctcaaaaaacaaaaacaaaatttgaaaatttaaaaaattatctaggtttttatattctcagaattcagaaggctgagaccagaaattctgaggatcagaaattcaaagccagcctgagctagatagtaaaaggtttgtttttttttttaagttaaaaatattttaaattatttctgttaaataaataaaattttaaaacgtaaaaattcacagcccaaaattgtatatatggaatggggttgattacatacctctaattttgcatgtacagaacaagaccgatggggaaaaaaaaatacatctagaattaaacttcacccagaaggatggtgggccaatgtaatagtctcttcctctcccagtgtagttccagtccagggctaaacagtatggtgtgtgcctctgctgctcttacaggaaagcgagcaggcagaaaagatcaacatcagccttgccttcttcctgtatgacctcctgtcaatcatggacagaggcttcgtgttcaacctcatcaagcattactgcagccaggtgagcgccccggagctgcggctcagccccttcccacccactgcttatgtgacagagtattgccctcttcagtgtgaccccccacacatcttggactttcaccatctgtagagtgtgcgggtcctttggctaccctggatggcctgaacccctggagcatgcatcaaagctgtcagcaagtcagtctgaggaaactgaattttctcaggagcgtgacttgctccagttaacagagaaatcacaggactgtgcatttaatcttggatcagggcatccagagtttgagacggggacgatggcttcatgtgcgagtgtgaggacctgagtttagagctgcggcacccacctaaaagctggtgacgtaagcctctcaccccggtgttcctggagacagacattggaagtggagctaaggcagatcccaagggcttgctggaaagccacagaagaaagcatttgacattctcctgacctgcagttctcacacatacacacacacacacacacacacacacacacacacacacacacagaggaaaggagaaaccaaaatataaggtttcttttcagtcattagaattattaattaaattgtggtttgaggttctaatcttaaaaatctgaagaactcggattgaatttgcaggagtataaagcacatggttttttaatgcggcacaagtgataactaccccagagggttgttgttgttgctgctgctgctgctgctgctgttgttgctgttgttgttttgagccagagtctcactatataactctagctgccctagaactatgtaaaccaggcactcagagaccagcctacccctgtgtcccgagtgatgggattaaatgcatgcaccaccttgcccagctttctccccgaaaattttgaacataattctttcttgattgtctcctatcagaatatcctggcaataagaacataatattgttactacacctcttcttccatatttcttctcttcaccatggccaccatgtctgccactattaccacaaccacaacaaccaccaccccctctcccaggctgccatcaccgccaccatcactgagactcggaacagttagtaatgggatggctttaaatgtcatctctgtgtcttcttggtttccttggttacaaaatgcaagggttctctgctgggctttgaggggtgtggtaccttatcgaggagaaaggtgtgaccagaggagacacaggagcctcactgggctgcgccagagaaaaaagctctgcccagtcaaccatccagaggtttcccgaaaggagctgccatccaggggaaccaggagtggccaaagttcaggcttgctcgtgtgtgtgtgtgtgtgtgtgtgtgtgtgtgtgtctgtctgtctgtctgtctgtctgtctgtctgtctatgtagtgggtaactggtgaggttgctctgcaggcaaagttggaatctgggtcagattactggaggggctgtaggctctaccttctcagtaggaaacagctatgcattgagggctcctgagctctgcaaagtagaaactaaaggctggaattctgtttgggtttgagctgctcttgacattttggttgtgagcctgggctttaacaactgagtcgtcatctccacaacccgttgagctgctctttaaaggggaatacgagaagacccttgaatttgtgaacccattgctgttgctcagcatcacatagacaacgtgagatgcagctgcacaggtctgtctgattcttgcttgggacaactactgcacagaactgcacagtgagctcttagcagatactgttggtgcttatgtaatttaaaacagttaacaacttgttaattaagtagccatacattctgactaaagccataaagtggctaactttaatcccagcattctcggagacagaagtatgtggatgtctgtgagttcaaggccagcctggtctatatagactttctggccagccaaggctacatagtacaaccttttctttaaaaagacagacgatccctatcaagtgatttcttcttaactaaaaattgtaagagtgtattatgtgaaactagagagagagcattctagcaatattattaaataatttagctacaatgcttttaagtattaaattatatatcaaacagctaatgtgcatttgaggttataaggaaggcatattttagagatatattaataatttcttaatttgcagatttcttatttgtggagttaaaataatttgaattattctgtatgttttcttgtgacttcttccaatacaaaaatgcattattttataattacaaaataaaaaaggtttaatgctttcaaaaattagttttaaacatggttctagctgcatatgtagcagaggatgaccttgtcaggcatcaatgggaggagaggtccttggtcctatgaaggctcgatagataccccagtgtaggggaatcaagggcagggaggcaggagtgaatgggtgggtggaagagcaccctcatagaagcagggggagggggagtggaatagggggtttctgggaggggggacactgggaaagggataacattttaaatgtaaataaataaaatatccaattaaaaaaatggggtggggtagacctacttccacaagaattatgcaatgaattagcctatattcaaataaggcttaatacccacagtaataaattcacatatagaagtatctgttctatcaaaagcttcatattttaaacttaatattgttaatagctaataaaatagatctgagaccatttttagctggaaaaatagtttttaaatagatagatctattattaatatttatattaaactatttgacccacaatactttgtctgtattcacttagtgtattttttttcaaatatctgaagttaacatttctgtcctagtttaacaaaattatctgtttagaaagtttcttagagagtctattcataaacttccatgccctaaaaatgtgaagattaatccaaactgacaaattttggtatagtcaagaaaagataactgattttaatacaagccctttaaattctatggagattttggtaagaaatattagtatatatcataaacattgatgcattgaaaattctttcaagaaaatatgaaatactcgctgtctaaatccactcagggcttgggagatcagaattaacattaaaatgtgttgtgtttcataggctaccatgttcaaaacacaaatatagcacatatctgtcaacacactttcataaaagggaatcctaaatgaccaagcttggtattactttattctgtttctcatacgctctcaaatcatcagagggaattaattcttttgtattggaaattgccttaagtgctcaaaaatcttttagggggctgattttcaaataatcgaatgcatagaatttcagttttggtgtatgctggtgtggtagacgtgtcagtagtaaggaaccacaggagttagagccaacacagagagaggtggtccctggcttgtttttataacacccgtcatctccaagccaaatcgacccctaagtttcccaaaagatgtcctggtaagaagagactcgtagggaggcggtcccatcctccatgtccacctgtctgccctgtggcagatcccatcagagtgaacaacagcaaggacttcagaactgctgggctccagagcactgtgtgcctatcacgtacaagcccatctgttttcaaagcttcagaatggacgaggggaaaggtgatctcagagcagcagggcatgggtgactgtgcggggtggggccacttgccttccaaaacaaaagtaaggtcacctacagcacacagcctcctgccatgcacaatgctgtcttccacggtcagtttgtcacctcttggtggcagtttgtagtttcgcctcttagacacagttgaatttgcaggaaatgtgttccgttgcgctatgccgaagctggtatctcaagcttattttctgcataggttggctgtagcgttgattagccaccataaggttggagcaagagttcccatttggggcccgctgttaagaatagtagtaaataaaagtcggctggagctcccggaatgtcatttgttgctctctcaggttaacctttcctccaatggatgtctgtctgtgcagaggaagagtgtgtcagtgtctgttgagctccgctcccgttatcctacactaaacattctttcctctgcctctttccctccagctgtcagccaagctgaatatccttccaacgctcatctccatgcggctggaattcctgaggatcctctgcagccatgagcactacctcaacttgaacctcctcttcatgaataccgacaccgcaccagcatctccctgcccctccatatcctcccaggtagtctgctaactacaggaaaggggcgagctgctttgttaattagcttagttcaatggggcatctcctatcttactaattagaggaaaatcacactattcaaaccagatcagttgatccagatatgggctctacggttccctgaagctgcagcatctaaattgaccattttcaaatcaagtaatttggcacaagggtccctaaggaggttaactatgtaggaagaaatctgtaagcctaggaaaatgaagaaacacaggttaagtctcaagtcctccactgtcgacataaaccaattattgtacaatatagtgtgcaaatacaggtttagtatatttgcaaatacaggtttgcaatgtctagcaagattcagaagcactgtgttagcctagtctctttgtccgacagcttacaaaggaagaactgcagagggggaggggcacgagatgaaatgattcccaataggatttgactgtggcaaatgtccttactgcgtcggcaccagaggtttctcaaggagttagtgtcctctagaaaacccttaaagaaatgttattttatagccctaatccagatgtgggaaacaaggcagatgttgacagcagtaggcaagatagctcaggatggtattagattctattctgctgcatatccttggtactagtacagagggaaaggcttgacagtgataagcgccttaagttccaggactaagaggacgggggtggggatcacatgggcccaggagttagttccagatcagcctgagcattatagtgaagcctcatttaaaaataataataataataataagtcatagtagtagctatttgtgcctgacaatatacctgaagttagctccatgaccattataatgtgatctgggacacacgtgacttacaaggaccaattccaaatggacttattattgtctgctgtcgtctgttctgtgggctgaatcctataacttccccatgctgaccttgccctgggtcctctccccatgctcctcttctggctgccctaaagagttgacagacccagggcccctactccacagagctccaggacttgcagggacacttacttctgtccccggtgaaggatgtcacgctcccggagtaagaacacgggacaggaatggcctagggctgccaactctggcattgtcgtagcagacaccacttctggttccaggccagctaacatccagacactgtgctcagatgaccttcagaaaggattctggggagacagaccacagcgagggactgggtacagtccttatttctctgtccacgtgtaccctgggctgttcatctgcaacttttaataccagacaggcaagggagggattagctagttttctttgttctgtttttcccattttgctgttctggggacctggtcatatcaggcacatttcccaccactaagcttgacccctagcctagttttcatagtcatgttcatgttggccagtcagtgcatgcgccgtccggccagagctccgtaaatgcaagccagcactgttttaattccagctcttcatactcataaagctgccgttggtatttctgtagaactcgagttcctgctccagtttccaggaccaaaagattgccagcatgttcgatctgaccccggagtaccggcagcagcacttccttacagggctgctcttcacggagctggctgttgccctggatgctgagggggatgggtgagtatctgacgcctaaaatggaacctgaagggaaagatgttaacagcattcccagttcaacttcttatgtgtacagcaagacctcagaactgtaccacttaccagttccaagaagaagcactcctgtcttaagaaagtggtactggtggagtatagagaggcaaggtgattagaagatccatgaaatgggcttctttttacagcactggcagttgaactgagagcctctcacactgtaggccagtactgtatcaatgagccacattcccagccccaaatgtctattgtttgtttgttttttattttcgtgacagtttctctgtgtagtcctggctatcctagaactcactctgtagaccaggcttgcctcaaactcagaaatctgcctgcctctgccttccaagtgctagaattaatggtgtgcaccaccaccatacctgcctcagaaagaggttttgttttgttttgttttgttttgttttgttttgttttgttttgttttgttttgtttttcgagacagggtttctctgtatagccctggctgtcctggaactcactttgtagaccaggctggcctcgaacttagaaatctgcctgcctctgcctcccgagtgctgggattaaaggcgtgtgccaccacgcccggctcagaaagactttttaaagtcccttgtttgagcagaatttgcagagaatgctttgctgagtgaattccctaagggcaaacccattttgcaggggaggctgctgaggtggaacccagggctttgcacacactaagcaggcgctcctccactaagctatcccgtcagccctaacaaggtcacctctgacaaagtgagcacagagacgaaataaataccagcatgccactgtccgaggctggcaaaggaagtgacggtgaagaagccagctgtcttgggtctagatgacgcttcttatgggcaagccttctcaggcaaaggcagatgccataggcatgggtctcgtgaatcttctcactgtgtccatccctgagcacctgagtgtatggcagtgcccggacttacttgttggctcttggcttgtattctgtcatcttttctctgctctaacgacattccagtcttctcagaattttctgtcctataactaacttattttctcagcatcaaaaagtgccctaggatatatgctgataaggtcctgaaagaagaaaatttgccttgcaatataaacaaccccccattttcactttcttaattgtttttaataaatagcatggctttaagtaatttctgaaactatcttttatatacacagtagcagtagtttttaattttctatttttgtcccagttggagacatccctgccgtctggttttgattcttctaaaatcattgctgggatattgctatatagctttagctgttccgggcttcactatgcaaactagactggcctcaaacttacagagatctgcctgcctctgcctccccccaccaccacccccagtactggagttagaggcatgtgccaccatgctgagctcctaatatttttgaagagcaaaaggttgaaatagacattttccaaagaatgcgtggtcaaaagcacacaaaaaaggtgtccagaatctctaacagtcaggcagtgcttcattaaaacaatgattatataccacattctgcctactagaatagtttgatcaacaagacagacagccagggatgtggctcagtggtagatctctagcatgtgctaaggtctgggttccatccccagcactttaaaaaaaaaaaaaaagaaagaaaagaaaagaaaagaaagaaagaaaaaagatggttgcaaaaaagaaaaaaagaaagaaagaaagaaaagacatatatatagcacccagacaccgctggaaggggggcaacattgttctttagaggtaaaactatagagttcccattccagtagtttgactgagatatatgcccaagagataaatacttacaccacacaaaaaccagaagcattcgtcattggtgatagtcctaaagtagaaacaacccaaaggttcatcaattgatgaatggataagtgaaattattttctgtgcacaatggaacattactcagtgtccaaaaggaatgaaggatttacgcaatatgatgaatctgaaaacagcaagctaaagagtagaccaggatgggaacaccggatgtccgtcttctactctgttttgctttctttttcacatggtcactgaattgtccaggatactttgggcactctggtttaagaagacagggtctccctccccatagcctggtttctctctattattctgtccacagaattagcagagtacagagaaaagccgtgagtgccatccacagccttctgtgttctcacgacctggatccacggtgtcgcaaaccggaagtgaaagtcaaaatcgccgccctttacctgccgttggtcggcatcattctggacgctctgccacagctctatgactttacaggtaaggatctgtctcctatcttagaacagcgaggcccctgccagacgcctctcacacaggaagcaagcaagggctctcaccagctggtcagtgcctcacagcagtggtcactaaacctttttttttttaaccagacaggtttttaaagatacacaattatacacacacacacactcacacacacacacacacacacacacacacatatatcagaaactatttgttcttcattcattgatcggctagtttatgattgtcatccactgcaccgaaaggatgaactataacagagctaattactctcctttgggatcgctgttctgttgccttcaaataaacctgttcattctctttcatgaggcttatgagggagtagttaaaatcaaacaacttttgctcttataccaaccaactgacacacaatccaaggagtctttcagtattaggaaaattacgcagcagcagaaaacgctttgcttttggcaataagaggtcaattgtacaattagaagaaaaaaaacacaaatttaaaaaaaaaaagtccccacgtcttggatttatgttcctattatagtgtggaccagagagtataggtgggagtccagcatcctggtcacttccaagcagtccttgctcggtgagattgtagaggttaccatgttggaggttgctgatgaatgagctagagtctggagagtgcctgcctgagtctagccatccttacaaggcggtcaccagtgagtctcagagaaccatctgaaccatgaacctgtgagtcttagagaaccatgccacttcctcctagtacagtggcatgcttgactaaacaatttgtaaaatcatgacaatagcaactatttagctcgcataataatgagactagagttcaggagatatcttagtaaagagctggccagccataggaatctgcattcgattctcagagctcacattaaaaacctccgacttggtgctatgcacttgtgattccagcactgggaaggtgagacaggaagatccctggacacaatccaatcagccagccagaaaaaacaaaggtggcgatgcccgaggaacaaaacccaaggtcctctccttccctccgaatgcatacacatagtctcacatccttcatatacaaacagatacacgaaagagaccaaccgcctagaacgtctaattcatgcacatcgtagagtgagaagcaagcactcctatggacgtagttatttctcttctttattaaaaatgacaatgacaaaaacccctcctgtaaatcagcaggagaaagctcagcagttaagagcgcttgcttctcttgcagaggacccagactctgttcccggcacccacaaggtggcctacagctgtctgtaactccagttccacaagatctggcaccctctcatgtcctctacagtgaacatgcacacatgcagggcaaacgctcatacacacggagtaagaataaacatctaaaaaagacagctcagggtctggtcagatggcgtaacttaagcgtacttaatgctctcccagaggatctgggtttggttccccgcacctcacacctgcctgtaactccagttccagaagatctgatgccctctcctgacctcaccaaatgcacaaggtacacacacatacatacatgcagatatatgcaggcagtaacacctacacataaaatttaaaaaaacttatttttctttttaaagatacatctcatggggctggagagattggagagatggttccatgttgaagagaactggctgctcttccagaggacccaggatcccatgcacccatgtagcagctcatagctgcctgtaactctagttccatgggatccagtgccctattctagcctcttagggcatcaagaatgaaagtggtatacagacatacatgttgcaaaacatggaaataaaaataaaaaaaattaaaaagataaataaaaaagataaaaataaaaaaataaaaaaggtgttaaagatatatctaaaattcaaacttcagctccatagattaccataagtgacctttgacaagtttggcttttcagtaaaagtagatatgcatatggtgataataaattagcatttgcttagacttttgaaatttagtaatttagtacaggatttactatagtgacatattatttctacagggtacttattctgtagttatacttcattgaatcattatttaaaacagagtatcataacctagcaaaagtattacaaaactttaaaaacttttattttttttaccatctgaaaaattagctcatagcctaagcgtatgctcaacattttgttttttaagcctgtctgctttttctatatatgaataattcatatagatatatatctggttttgaattacgtgctgacttcagtgagtaagatatgtctttcgcttgtcggggtgaagacgggaaaatgtggtctttggcttgacatcacacatgggaatgtttaatggcagatgctcgcagtggaaggagtcgtgccagtggctcgtatgaagaacaagatgtggccaacggaatcaaccagaatgtggccctggccatagcggggaatcactttaatttgaagaccagtggagcaatgctgtcttccttggtatgtgtgtactgtacatttcttgagtgtatttcttgttgatgtcacctcctcctaaacttctgatagaacccagcctagaacagacatgctttctgcctcaatactgcaatacaggaatcggtgaagctctccgatcagagagagctatgggaacagcaagagatgcacggggcagggttagccagtcccagtgtgaagctgaatctggggagtctgaaatcattgcagaaaagatcaaaccaaggtgtccatccttgcattggacgtagatggggcttcctccatgtgtttattagtattactgttcccctccgataaatgactaaggctccaaaagcctccagaacaaaaggcagccttcctaggtccccagggagtctaaggagatttgtcccccaacagaggggatctttgtggaatgtacatacctctgctgctgctgaggtgggaatcgcctgtttgccaatgcactttgtcagagcagcagttcagcttctagctcagtgttgttattgttttgttcttaattggcttgacgggctctgtttcatgatcctagagatgagcctaaagtgacccggggtttgcaattgccccgcagtcaattttgttttgcatttcaacgtaatgtctgaatctgcagcaaactcgcttggttttcttctgagaaggcagggtcttgacacaatttctttactagctgactttttatgtcttccttctagcacttagccatctctgcccctttcacccttgcccaggagggttggttggagagcagggaaacaggacacctgagactcggcaacactaatcttactcactaagcagtgccttagatcacattctacctctgaatcatccaccttaccgaagttacctgctcagggcagtgtgtgtcttttatattaattgcctgtaaggagtagagaaggtgaagttcacctattaaaacgtgtccctgtgaagttctagcggaagactgtccctttttagggtcatacttacaatagcttaaatgaaagcaagtttgccctctgtcacttccatccaagactaagattttcttcacacagttcacaaattcctcactgcaatgttactgccacaggccaccggatattaggtgcaccacatgaagcaaggggtccgctgcacattgttatctgtcttggtgttatgagttttagcaagtgtgcttagtagcactctgtagtgaacattcaccaaggctattacagcacatggcctgaggacccacccaccctcaagtgaatcttagtgtaggtcccattgcagatggctttgccaagacttgactcatgtgctaaccagttcatgatcttgatgtgaaactgaactatgaactgttggattgttttatggtatctggtcaggctagtttctcttccggtcctccactggccatcttgaagaagaagtccttggagatcttagcagcaagaaagcccctttgcatcactggtattgaagagcaacatcaagatccagagcagggcaccagactgtgctcagttcagcggtccatagcttaatctaaactctgccccagcgtgcgtctcctgagcagccctgcaccatgcacacattctctaacctcgggaagacagggctactggaagcagatacccagccatgtgctggaagtaggcacagtgttctgaggggttctcatctcttacacttttaagttttcctgtggcctgacttcttccctcccttgccctcccccctccggccccccatttcgcccccttccagccctataagcagtacaacatgctgaatgcagacaccacccgccacctcatgatttgcttcctgtggatcatgaaaaatgctgatcagagcctcatcaggaagtggatcgctgacctgccttccatgcagctcaataggattctggacctgctgttcatctgtgtctcctgctttgaatacaaggcaagtggcaggggtgggggagtgtcttagctgttccaatcctgtcttcttactctcttccctttgggcaacagcagcatcgtctgtccttcctacactgtattacaacccacagcctgtttgcatctgcagattgcaaacaggaaagaatatctgcctattgcagtgggcctgttcctgccaataaagctttatacacaggagcccccagaaaagtggaatctatgtctaaactctccaccatgaccctgttctcttttgacaaatctctccctctgcagagatcccactaaaccaaatgtgtttctacatctgttcttccagggaaagcagagttctgacaaagtcagtaaccaggtcctgcagaagtcaagagacgtcaaggccaagctggaagaggccctgctccgtggggaaggagcccgtggggagatgatgcgccgtcgcattccaggtgtgcggtagtcctcccatctgctacacagctcttcttcttggacgtcactccccgagacagcaagttctgggaccctgtgcttgtcttgtagaatgtttgttccccacttctgagggaaagagtcaccctgaaagtatccccaaatgccatgttttaattaagatttaaccgcaaagaaaggccacatctaagaaagtggttcatgcgctgtcttccctgtttcaagtccctctaggggacgtgatcaacaaactggagggctctgcagtccacagtcatatccctgagtcattcaagatgctactgcatagagcagtctccccaaaaagcgtgacggtgtaccattgtcctagggttcccatgacccaaacacctgcactcatcactttaatatgataaatatgattactacccccagtgaaacagtgacaggagggcatggactctggagggctttcacctgacaccctgacctaccttctagcaagtcagggaggctcacaggaacccctgctcaggagaactgtggaaggcagaccatcttccagagctgcctccagttcacccagggcaggtcaccacaggcgtagacacggcggctctgtctcctcagagcagtacagactgatgaacagggcgtctgtgctgatgcttctcagctaagctgagcactgaacttttggttatcttagagggtttcatgctaatcaaattcctgtcgtgtgtttcttaactcccagggactgaccggtttccaggcataaatgaaaatctgagatggaggaaagagcagacacagtggcggcaggctaatgagaagctggacaagtaagttgccctgccacaggctctgcaccgtgttcactaacagtcttagctcttgttcccaggctacttgtgttactggggcaactgcatccttccttctgagggtagtaagaaaaggaaacatactgtctgcttaagtacagctccagctgcccggaatgcccagagacataagaagctgtgacttcagctcttaacaatgtatccagagtttaaagacacctggtttccacagccccagttgatgaaagcaattggtgaggagcagagactagaaaaaggaggacctggtctcagcctcccaactccgcatctgtatttccataatgaaaatggatgcaaagatggatattcagagatagtgataatagctttacattttattgttcaaaaaaaatcaaaatatatttgattttggaatatatttgatttgatttggaagtacataacaaagtaccaggttgttacagtgttaggggaacattaagtgatcaggaccagtgcttggttttagagtactcttcaatctctaattacatacagtagctgcatttgtaaaaggccacaaagaaatttaccaagacattaataatgatcttcgggttttaaaaatgtaagtgattgatattttctttttcatagttcttgggtttcctacattggatttgcatttacctattataataaaaaatgcaagaaaaatgaaaactaatcttgcttagattataacatataccgtgtgtgtgtgtgtgtgtgtgtgtgtgtgtgtgtgtgtgttatcttaatttgctttcagttgctctaataaaaacaccatgatcaaaagcagcttgaggaggacagggcttcttttatcctatgacttaaaatccatcacagaaggaagtcagagcaggaacctggaggcagaaactaaagcagagggcatgaagaaacactgcttatcggtttgctcttcatgacttgctagcctttttccttatataactcaggactgcttgcccaggggtagcagccctaacagcagccctaacatctaccgtcaatcaagaacatgcctccatagacttgcctgtaggcaagatgatagaggcagtccctcaattttgagattccctcctcccagatatgtctaggtttgtgtcaagttgacagaaaccagccagcagatgtgtataggtatatggtatatcaaagggggaaaggagggggaaagggagggagggagggagggagggagggaggaaagagagagagagaaagagtaccatatataacaatttagacatatgagcactaaagtgaaatgtgtggggatagataatgtctgtcttctttgcctctaagccataggtgcccttatgaatcccagattcactgagcaaaacactgaatggttcaagaacccacatacacaacaaaacatagatagtacagcttcactgtgtctgaagtgctcaccatgaggaggggtgagaagatagcagtgttgtagtaaataaatgttaatgtcttcaccattaccgtaggataacacatctttgttaacctgtaggactcttagggaggggctcaaagtttctctaaaatatcacctgttttcctagaaaccgcttaataattattttgaaaagcatgccaaataatccggtagcccatagcttcttaacaatgaaggatgctccttgtgccagtcggtgtatctgataccaatgacacggtgatggctttgccactaagcaagaatgtgctcctccgtggcttggaaaggagacgtccatagctggccagtccagagatacatggagaatcacattggtcacttgggtgtcacacgggagccccagttgttagccttattaataatgcccctttgcttagaagactggctcgcactgatcttcctagctggtgtttaagaactttgactctgtcagtacatttttgcacccggtttcagggaggaaatatggatttgaagtgacacagctaggcacttggccctgctttctctttttctctctccttgtccgattgctctcattcgggaggggagatagctggtgaagacaagggtgtaacaccaaagctgtgtgcaggaggcccagcactgcttagatgctaaccaggtcatctgctgcacaagatggagacagtgtggcaaggtgtgtttgactgggctctgtgaattgccctgggaagccgttcccatttgctgacatcagcagtcttcgctggaaccgtgcaggtcctgccagttctcagcagctccggctcgggtgggctgctcattatcagagtggctgatgaccccctcagtcctgcagccgggtggcaattaaaaccgtgcaagttagagctctttggaaatgttataattttgagatgacagcttctgtcatttcctcttatgtttattttaattttaattagtttgactcctgtttcttttagagcaatagtttttagcctggactacatattcaaatctcccgtgggaacttccaaagtctgtgtctgtgttgctctacctcctacccccacccacccagggcctctctatgtagacaaggctgcgtacgaactcacaaggtccacctgtctctgcctcctgagtcctgagattgaaggtgtacccaccacacccagcgtcaaagtgcccaaaggtaccctctgccagtttgttcagaacttctaggttagtcgaactttaaggtgattcaactgtgcaggcaagtctgaaccagactggtagacctcccaggagtgatgacaatattgcatgacaatatgaattacttaatgatactgagctatataattaaagtgactaaggtggtaagttctatgttacatgcattttatcacaattccaaaggcaggttaggactatctgtactgtcgattactggagctattaaccacatacagttctgaagcctggagcctggagtgtggctgtttcgtattgagatatagaataaataaataaataaataaataaataaataaataaataaaatgtgtgtgcaagattgcacatttcagcattgattttttatatttgttacttattaacagtatttttagtgtattgggctaaataaaatatggtaaaaagttaatactggctgggagtactggcccatgcccttcattctggtacccaagaggcagaggtaggtagatctctgtgagtttgagactagcctggtctacatggtgagcctggacttccaagacagtaaaacctttctaagaaaaagaaaagggaaaataatgcccttgatttcattttatcttttgtgtgtgtgtgtgtgtgtttgtgtgtgtgtgtgtgtgtgtgtgtgtgtgtgtgcatgcagctatcataatagataaaacaatgcacatggcctctagtacatttctactgtacagtgttggtcaaagtgcggttggttggttattttttttggttagggaattgctgttgttgttttgagacaggattccttaggtagtcttggctggcttcagaactcactatgtaaaccaggctggcctcaaactcatagagatccacctgcccatgcctgtcatataccaccatgtctggcatctggccctcctgctataaatttaaacataccagtaaattaattttaaaaacttgtatattttctcatatagagaaatgaggggaagggttgtcaaacaattaggactgaagaatctatcctgaatgtgaaatcagttaaaaatacctttctgagcaaccagtgttgtatatacaactgttcctggataaggaaaaggaaaagagctatgtggataatcctggtctaagacatttgaactgatagcacaataccccagcatctgtggtaacatcttggccactgaaacatattgggaaagtcaggtttttcttatcctttaaaactaaatttggactgtaaaaataagttatagtaataccctttcatctacaggcaatgcactccagatacccaaagctgtgaatggttccaatgccttgtctacatttctatgaaatgtgtcaatcaatctggtaactaagacagcaactcagtaaatatcatgtagatggcattaacagcatggatacatacactggacaaagtgataatccatcacctgacaggagccaacgcagtgtagggaccacgccttgcttattctggaagacgctcactaactatgggtaactgaaccgatgaaggcaaagctgtgggagaggagagcccggtctccctttctagcttcacttgttttatgagggtggatgggctagtacacagagtgcaccagctctttaaaaattaaatctcttagtaacttctgtttcctgccgggtagcatccagtccagtaacctccagcagaatgtttggtgccccaccccatgggatgtgaactttgcttcccactggagaaggaagaaggcattctcgctcttagtgaagccaccttccctccttctcaggacgactttgagtagtaaagagctgattctcccattccacagttctagctctgtttgccagcgttcaccgagatcaagtcgcatcctgtctctctaccctgctgcggctctcccccgcatcccacaaccacccattcagatccagagagtgctcacgcgacgccccaaggctttaagcagctatctgatgggctcacctaattgttagtagtaaccaataattaacttctcgacccattttgtcatttttataattgccatcattattaataaccctggggctatggatggcctggggacttcactagaccaccttcccaaccagacacgaatctcaggaaacaccttcagccctgagattggctatgttgaggtggccactttgtgtggatttgatggttgacggttgtaaagaatccttcaggacccggtgcatgggttgtcatctctggtacctggccgagccacacaatgctttaatgggtgatgtgctttttgtttcttagaacaaaggcagagttagatcaagaagccttgatcagtggcaacctggctacagaagctaatttgatcatcctggatatgcaggagaacatcatccaggtgaggatgactcactccccatcgggcccgctcgggggtgccattcttggaaatagaaagggggttcgtcatccaaaattgaaaaagacacaggcgtgattctagaatgtataaaactaaagtgggaacgtttggaatttgcagcagttgcctcccttgcagattccagaggtgccaggcatcctctggcttttctgactgctactcccttggaaagagttagatgtttgaggagctgaccctcaaagttactctggccaaggacctgctacattgataaaggaggcagagccttttagccaagcacctcgagaacatgggtagctagattgctcctggtaggtcggttccagctggataatacaccggcgaggctaggagttgctgataccatgggggaaattggggtcccctcttggggtttttagtctccttaataaaagcatttaagggtggactcaaggagaaactgaagggcaattttattagcatcttaaagacaaatccccaaagctgacaagctgtaagtcacagcggctgcttggaggagaagacgaaggaaagccattccgtttaagctggcatggaggttggacacataacagataagtagtccacatggcagggaagggggcccagaacactggcaaaccccagagtattggggaaagtatgatgagaaaagagagaacgataaaaaggagaagttagacttttctgaatagtttttaaaagcaaacagatgtacagtttgtagcattgactcagtaagccatggtgctaggaggtggggattcttgggagaaaaagtacactatcccattaaagggttaattattctacccatctcctaagcgtggcttaaggtgaacctggtaccctgtgggtggtcccctggccaagtgatttgctatcacagctagaatgttaggcctaatacaggccagagattgtattctcttagccagaaggtttcttttattgggtctttatttctactctaacttttatgattgcactgggtaaaaaaacagtgctaagtgtgacaaaatggtgtctgttttggactcggattgctgaaggacaatcgtgtgtcccatgaatttggaatccctactgtagggcagtacaagtcagaactctgttgcaatggtttcgcatccttaggcttaaccaacaaccactgatggaaagtacttcagaataaaaatgcatctgcactgaacatgtgcaaactttttagtttcctatcattgttccatgaacaatacagagtatcaatagctgacacgatgcttcaatgttgtgttaggtactgaaagtaagctagggataatttaaaacacatgagagaattgtgggttatatatgcaaatactaccccctttaatatgagggacttgagcatccaatgctgactcaaggatcttttgaaagtgtcttaacttcggtaccctaaatatttagcatcacatgaataatatctttgtacaagctgtttctgagagcaatatacctgataccaagcctcaaaatgatttgtagtttcctaagaaagctaaactatagaaaatactgtttattattattctcattagtccttctgtggccaatttggaagttataactgccaccaaaaagcctcttgtacttgaagctcgaagttgttatcgaaacactgacatgaaatcaggcctacaaagaaaagaacaatccaaaagccatgacccaggctggagggagatgaaccttagaacttggcttaatatcctaaattgggcacaagtctcgagtcagttagttttgaaaagagggtcatggggaaagagagcttacgctctcatggtggttaatgaacgatgtagatggcagctcacagagcccttgccaccttctgctgagaaggcgcatcagtcctctaagataatcagcagccgcctctcctgcctccagccttactcagtgatgatgttcttccaccccaccccacccaccccccaggcaagctccgccctggactgtaaagacagcctgctgggaggtgtcctccgggtcctggtgaattctctgagctgtgaccagagcaccacctacctgactcactgtttcgcaaccctccgagccctcatcgccaaggtaaacatgggatgcttgttttcttactcttaattaagagtgcggttcttgtctggcttcacatcgctctgtaagcagatcagacgtcatgcagggcatggagtaaaagcttttttccctctgaaagcagacacactgattttcagagactcactgtggggaagccaaaccatggcttcacacttgcagtgtgggcccaactatggaaatttcaaatgaccactcactaaaagtcaatgacacgagagtgaaagtcaacgagcaactacagttcctctccctttcgttaataccttatacagtgagattcaatactaggcctggctcccattaattaatgtgacagaatgaccataataagatgctggcagatgcccgagaactgtggctagtagtctgttgagattattttcctcctttgtgggaaattttagtagatgggtgccttctacatgggatcttgtaaatttacaaagtggaattctgttataataattttctccttcttagtcaccaataatttctaaggaacccataagacacaagtaagtcctttatagctgtgacacactcagcagtgacttcaacctggctaacaatgaagttaaggacatagaccttacctcagccgtgtgactcacaggtggacgtcaccgcttacctccatgtctgacacttgcggctcattctgtttatggagcacggcgttaacccttcaggctcttggcttgtccagacagaccttttgcatgtcccaacatccagccgaagagctgtgaaagtgctcagggatgcctcatggccacctgtgtctcttctagtttggagacctgctgttcgaggaggagatggagcagtgtgctgacctgtgtcagcgggtgctacatcactgcagcagcagcatggacgtcacacggagccaagcctgcgccaccctctacctcctcatgcggttcagcttcggagccaccagtgtaagcacagacgggctgggcggcccagaaccaagagagggcaggaatgaaaggcagaggtagaagggagctttgcagtgtggcttttatgtatgccctgtgcggaagaccccatgagcaccagcatttgagaggaagggctggagggtgtggtgctgcccagcagtcaaagttcctgtgtgtgcgcaggttcaggattcacaaaagagtgtcctgtcctaaagtttgagtccgtaccagttctggatggtaccaggacatttgtggatgagaatggtaaatgattgttgtcatctgggcctgatgacaaacatctcactatgtagccctggctgtcttggaactcactatatagaccaggctggcctgaaacgcacagatatctgcctgcctctgcctttgcctcctctgcatttaaaggcgtgcaccaccatgcctggcctggacctgaatagacattttgtgagttcagtttcatagcaaacctgtgccttagtttgtgcatatttcaggatccatgcttgggactttatttgccacaatgtcacattagtgggacatcttttaaaataatgttttatagcccaacagggtggtacacacctgtaatcttagcactcaggaggcagaggcaggtggatcactgagtttgaagctagcctggtctacagagtaagttccaggacagccagggttacatagagaaacactgtgtatcgaaaaccaaagatgggggttgggaagagagagactatgttttaccaaatgtattgtaaattctgtaaaagaagatctttaacctcagaaaagaatttacagatgaaacggggcagataaatgggctaagagaagaaagggagactccgtagggttttggtttgctttgtcttatttttgtctattttgtgttaattctgggaactgaactgaagaccccacaatgctaaatgtttactcctgagctataccccaggccctggccctcatgagatgttagggagaactatttaaaagcttatagggcatgctcatgggcccttaagttgtggttttccacagtcctgggagaaaagaagacatggaaagctactgcttacttcaaatccaaaaaatctcaaaagttctgcctttatgaatctctgtgagttcaaggccagcctggtatacagagtgagttccaggacagtcagagttacacggtgaaacacaaaacaaacaagcaaaaatgctgcctcagaaggttccaaagagactcttggcacaaagaccaactttatatcctgtgaccaactttagaacaaatctatcagccctgcagtgtggcggcagcccaaacgcaaagaaaatttaaagggagcctgacagacttatgggagcatacggtccatccaacccatttcaacagcagtgcgtatcttgtgcaaagtgtagctcacagtttattgagagaaaaggaaatgcttaagatgggaatgaaagaaacaccaggagctgcttgtgtctggcccgcagcctcccgctaggtacctgctgactctcgtttgctccatctcttctgatgcagaactttgcaagggtaaagatgcaagtgaccatggcactggcatccctggtaggcaaagcaccagacttcaacgaagagcacctgagaaggtccttaaggacaattttggcctattcagaagaggacacggccatgcagacaactccttttcccatgcaggtagacccgtgaacatagctttgtcttatgtatgagtttgacattaaccatttataagcatatacatttatgattttgcatataaaattttgcatataaaatttatacgtgtgatttgcaggtatttttaacttatcctatagttgaatgttctcagtgcttgagaaatgcaatacacacaccactgtcctcaacttcaagatggcaaaagtctattaagagagcatagtaccaaaacaagaagactcaaaataagaaaagtgatacctgagtgtgtggtaacaaatactgtacaagatttttaaaagggagtacaggggaacaggggctagtgtaattcagtggtggagcctaaaatacacaaaactctgggaatgatctccacctcaacataaaggtagatagatagatagacagacagacagacagacagacagaaacacacagagatgggtagacagatagtgggggtgattaatgaagaactagtgctctggaatgtgggagtagagaggagtgaaattcctagagttgaattcaggggagagggagagggcgtaaggagcatgagtggtaatgattcgtgtgtaaggcagacgagaagatcctaattaagaagagcttacaaacaagatccgtcctaaagaaaccgggaggacagttacccttctgtctcgctgccatgcccatgtggcagatgcccatgtgacaagtgcagcctgtctgcctttagctccaggccctagcctattctgtagtaggctctcacaccctgatagtccacagaagtttatacctttgcagtttacaaatattcaaagcccattcagactgtaaagtcaagtgttggagagggggatagtataagggagcttcatggattccagggccctgggtcacctgtggaccttggattgcacagatgaaaatggccccaggagattcttggattttctctgccttggatccctgcctctctctgagcaaagccttgccttgcacttcactgtctgctcttttcctgcaggtggaggaacttctctgcaatctgaacagcattctgtacgacacagtgaagatgagggaattccaggaagaccctgagatgcttatggacctcatgtacaggtaaatgctcccgggaagacagagagcattggggttaggcgtggtgatgcaaaccttcagtcccagcttcagtcccagcactcaagaggaagaggcagctgagttcaaggccagcctggtccacagagtgagttccaggatagccagggctacacagagaaaccctgtcttgaaaaagaaaagaaaggaaaggaaaggaaaggaaaggaaaagaaaggaaaggaaaggaaaggaaaggaaaggaaaggaaaggaaaggaaaggaaaggaaaggaaaggaaaggaaaggaaaggaaagagaaaagacatttgtgatatttgtgagtctggatatttgtctaggtgacactgcatcttttttctttttttgttaattttttactttatttatatgaatgttttgtcggcatatatatctgtgtaccatgttccccggaggccagaagagggcatcaaatcccctggggctagagttgtagatggttaggagccagcatgggggtgctggagccaacccaggtcctccaggagaacagtcagtgatcctgaccactgagccatctctcaagccccagttggagccttctctgatgtcattatcataactaagataggtaggacagtttggggtaacatccaaaaatatatgagcactaatggaaaacgagttggttcattcctaaatttccaaaaagattaccttaactaagtgcaatgcttattttaaattaagagagagagaaaaaaaaaacattggctgttatatgaattatttcccacatgctgtgctgaagttgtattcataaacagaaacagctttactttagaagtcagtgtactttaaaccctttctctttaggttcagtagtttggggaaaaattacttacacagttaaaaatactcagatctgtaagagaaacaatacattataactttgagataaaaggaaggaaattacttgagatccatgaaaatggacgtcattttatcagacttttttcctcataagacttgtgctagccgggcagtggtggcacacacctttaaatcccagcacttgggaggtagaggcaggtggatttctgagttcaaggccagcctggtctacagagtgagttccaggacagccagggctacgcaaagaaaccctgtctcgaaaaagcatcggcacccagcacaccattgtcatctagacaatgttaccttttctctgttttgaaattgtaaacaaaaatattaagggtgataataaagcttacaaaagagagaaccctgaagcaccaccaccaccaccaccaccaccccccgccccttaagagcagtgacgttgaaaggttatccatgaaactttcctaatctgtcttcagaattgccaagagctaccaggcatcgcctgacctgcggctgacttggctccagaacatggcagagaaacacactaagaagaagtgcttcacagaggccgccatgtgcctggtgcatgcagccgccctggtggccgagtacctgagcatgctggaggaccacagctacctgccggtgggcagcgtcagctttcaggtaagacaggcagtgcatccaaccaggagctgggttccttccacctgagggaaggcgtcctcagccaccacaggtgatcctgcatggtacagaggaaagaccaaggatgtttccaccgttaaaatatcggttcccggttttctgtgttgctaccgttgaaaacccctgtgtcaaagcgatatcactgccttgtctaatggcctcaccatcttttaaaacatattcattacagtaatggtacttagattagaggtaacagtagctttgggagatattctcagacattttaggcatttgcccatccccacaagcctgtgaagcaggcagataaggaaggcagtgttacttctgtttcactgatgtaagaaacaagacggcattttttttttaaaagatcatttaaactctttctggaacatttgtatttggcttatctactggcaaggaagggacaccagtataatgattccctcacgggccagtccctcgattctgttccctggctttgtgggacccaactcttgtccaaagctaagaaagaatccaacttacctgaaattggaaagaaatggctccatggatgctttctgtgaacaacctgaaatttacccacagccatcaagggcaaattgtgccagacctaaaaactcttaacagggctgcccagcatccccttggactattgttactgtaatgcgctacttagagggcagaaaagtctcaaacaagtgttatgagtagtttttcttaaagagatctaagctacagagatgatcatccccgctgcttacaggacagccatggaccgttcccagccagagctgggaagctggagacaagcgtttatattgctcttgtttggatttccatggatgaatgtaaaaggctttgttctcattattgttcttcaacacagttttgtgatgctttctgtaaaggagaaagaaaagacgattctaagtagctttcccaggcttagagtaaaagacaccgaaactattgctggtgcagcccagagcttctggtttctcagggtctgttcatctgcgagctgggccttatctccagtcattgctgccgcctctcttacagtaacaaaaatacttactcttcgatttcattctcaacagataaattttagtctcaattcagaaatgtcttttataaagcccagttcaattctcgttcagacgcatagaaggattccatctggttttgagtcaagtgaataagaaactgtaaagcaatgtttgttttgtccacttgcctgtcacggaactgctgtagcgctgccctccagctcctccgtgacacacttgtccctttacatcgcactgtcacccttttttctcagctaatctactgagctattccttggccatctctcaagccttttcctaaatgctctactttatggtttactccttgatgcttaaacattatccaaatttcatttttactattatatttaataagtctcgctttatccttattttacttagaatttggttgactttcttattttgataggtgccaaggtgagataaaattccagaacacctgaggaagtctatgttatccttacgtggaatatacagatatatcttcttatatatttttatctattccttcttcttttttttgtctcttttggctgtttgttttgttttatagtgctgttgttctttgaaacaggggcttgtgatatagcccaggctagcccggggcttccctaggttgagcagcatagccttaaactcatagagatctgcctgccctgtgccattcaagttttcagatcaaaggccaccatgcctggctatccattccttctttcacattcattgaagatttatcctgtccacatgaactttatattctagcaactaatgataaatagaaaggatacaagatgctgtgaacattatcgtgtgccccagactagagtcaggggaaggatggagattgtgagaaggaaggtggaaggaactgtgatgtgtaagggcttcttaatgtgcagaacatgacgagccagatgtccttgaatacagaacagacttcaagccatgctgatgcctatgggagaaatactatatgtctatgggagaaatactatattctcccaagaatcctacaaagtcagtttggatatgggtgctggaaagggagtgataccaagcccacattaacctaaggagatgtggaatccattagcctgtatggggaaactagccctcagtcatacttgccagtctatacctagagacccaagctcatccaacctaggcagtgtctccaccttctggggtgtgggcatcactcttcacaggcagaatttccacactaaggatgctcgattaagattcaagactaggagagaagacggaaatcctcctttctagagttgcaaagaaagtctcagggcatcttattggttctgagcaggtcttatgtttatccctgaatcagtcataatggtcaaagtagtaagatggtctgattatctatcccatagtcacaggtcacactgagcattaccagtgtttttcttaaagaaagttaagatactttctgtcacagaagaataaaggaattcagacagtattagcaacaggtattctctgctgacagctctctctctctctctctctctctctctctctctctctctccttcatttcttcttccctccctcaccctctctctttctttgacaggatctcactggtcttgaactcagagagattgcctctgcctctgcctctgcctctgcctctgcctctgcctctgcctctgcctctgcctctgcctctgcctctgcctctgcctctgcctctgcctctgcctctgcctctgcctctctgcctctgcctctctgcctctgcctctctgcctctgcctctctgcctctgcctctctgcctctgcctctctgcctctgcctctgcctctgcctctgcctctgcctctgcctctgcctcaagtgctgggattttaggcttgtggccccatgcctgcctctattgcttcttaaacatcctgctttagtttttaaccttgctgtaataagattgagcctttgggaaagacttgcaaagcagagataactaacttggaagaataacaggagaaatgacttagaaggcagtgaggtccaagccactgagatcatcggaattctatccctggagtgcaggcaatgctgatctcacaaacacagatatggttgttacttttacaccctcactctgaagccaggaatgtccgcccagcatcttttccccccgtgacttacagctactgagctgcccggctcatacctattcctctatgagtagaaaaatctcatacagtgccagtcgtgctggtgtcctaagcgattagatcccttcagctgaactcttgccccctctgccatcagttcatcatgagaaatcacgtttggaagaaagattggtcacaagggactttgaaaaaaattctgtgttgataaaactgtattccaatgtaactgtgacaatctatgacgactgcctccttatggattcctaagggtgattcctgtgaccttgttcgccaagtcagaaagtggacagcctttatatatcacagagagcatcagagcaattttcaatgactggctggagtataccccaacctcaggggacagagtgttaaccattgttgagcacagcattaggaaggcgtgtcctgtgtgctctttgcagttactacacgctggaggtttcccatttcttctctataccatactcacttcttccatagctgtaagccaagaatggctcgtggcctatcagaggtattgatgtccctgccaggatcagagctcagatgaggcaagcggggtatgtgcagcacacagcttaaagagaaactcatgtcagaggcaagcaggtcccaagtcagccatcccaggaccctgaacatgagtgctgcctgaaggcttgtgccctgcgtttcccatccgagccaaccctgcccgaaatgcttcatcccctgttaagatgctctcatgcctgtagtttatagaaaggaaaaccacagaaacaaaaggggagggcagcttctgaattatatcacagcacccataaagacattctcgtccattactttcctatgtaatattacacttatgtagctcaaggtcaagactgcaggagcaacatgtttcagcaaaacaggaatcgattttctgctcactggccttgcccttaaaatccaaaacattccctctttgtccttagggtcatcgcactaacagtaaggttgtttcagctaaactgttactacattaaggaaagtgtcctttctagaccgttgccttatggttaaaaattgtagagtttggtgacaagtttcaaaatgaatggccaccagaagctcacaggttggaaccatagactcgtagcaatcatggtctggtgaaggttgaagagcttagcttctttatctgtctgggttttgtggtcccttgcttgtcaggtccgctgttccccgggctcacagtgggttctcttacagaatatttcttccaatgtgcttgaggagtctgcagtctctgatgacaccttgtcacctgatgaggacggcgtatgctctggtcggtacttcactgagagtggcctggtgggcctcctggagcaggctgcggagctcttcagcacggtcagtgtctacagggctcattcacacccacaggagcatgcaggacagggctgggcctggctggatgcttccggattggtccagtggagacgtccatgtccacaattgcaccagttctccaagggaggagagaaagcctttcaccgtgggcatactcgtatttccacagtgtgctcattggccaggagcagtttcactgtgttctttctagttaataggggtagaaactaagccacggaaagtgaaacagggtgcccaggttacacaatcagagatgaggcatattctcaatccctcattttcccactcacaggaaaaagtagaggaagatcctctgaggatctatgatgccttccacatctgacacccaactggtcttcaagacccatacccagggcagctcagagagatggaactgtggaagccatagaactatcccttagcccagatccagagccaccccttagcccgatctgggtctcccagtgaaagaaaagacacagaactacagtccaggtcaaggtggcaaggcactcgtagcttttcgttttaaccattgccctctgcccccatagtggaacccacgtaagtggagcactgtatttacctgaccaatctgttttcctccctacattatttctcattctcccctcttcacctccagactccctccctagactgtctacgtttgggcgtttgtgttcactacctttattctcctatctttgttttcctagaaaacttttccagaaaggaacttttaatttaacttttagtcacaaaactagctttcttattacattttcccacatacatatcattatacttttctcctatccactcacacacacacacacacacatacccttattttcctgaaattctagaaagtcaactggtaagaaccttattagctccctgaggccctgcatctggcgagaggagaacctaaaaaaaacccaaaagccacaagcacacctctccacacccctcactgcctgggccatctcctcccttgttttcagtttgtgaaaagcctccttagatggcaatgctatgttcgttccttacttacttgacgacataaagatagcaacgtgcctggtttgacctgaaagctatggctctccaaagatgcccagctgggcctggattctgtaaagcactgcgatgtccccctgtgtggtatttgcataattaactctggtcccttgtcttaaacgtccaatgcattaactaatcccgtctttcccagggaggcttgtacgagacggttaatgaagtctacaagctggtcatccctatcctggaggcacacagagatttccggaagctgacctccactcacgacaagctgcagaaggccttcgataacatcatcaacaaggtagctggggatgagcctggcccataagttctggtagcaacgctgcggcaggcgaccctgccttaacgctgcgccaccatctccctggcgctcatcattgctgtaactctccatcagacaaggaagggccggcagtacagtgtggcagattagattgctttatagctaggaaatgtgaggattttaaaatttgagttaaatgaaggccccagaagtctctcagtggatttcttttgtcatctagggtttattatgtacatattaaatctgcttaacagaggggatcttcgtaatgccagctgtgagaataaattgccgcccaataaccagtccttttagcccagtgggtcaccagtaagcacagctaaaggaggcttctctttgctcccgggacaggaccataagaggatgtttgggacctacttccgagttggtttctacggatcccgatttggggatttggatgagcaggagttcgtgtacaaggaacccgcaatcacgaagctcccggagatctcacatagactagaggtgagaaagtgagactgtgtgcgaccttggacattcccccccccccaagtagggcaatgtgtcatttttaaaatatgttcattgctggcctctaaatttcccaccttgcatttgtagtatgggaaagtaggcaagattgggaataccatactattgggacatttttctcttgaatcctgtgtgcgttttacagagtttaaagtttaaatcttgaatcttgtttttttttgttttttgttttttttcaagactataaaattcagtcagcatccacccttccttataaccccttccatacatggccaatatgtacccacagacattgggcatattgctttttgactttgaaggtcgtcatcttgatttgggaggcatctaagaaaactacagactcactccactgagatacagagcaactggaaagtaactgtggccagctcccagctgtagcctggcagctacgctgtgaaatagaaaacagtagttaagttctgaaaagccagagcaaaaagaaatagcatagagaaaagccgagacaacagaagcagaagttgagaggaacaaacataagagccctctctgtctgagagaccagggtcgtgtgaagagctgactcctccctacttaattaacgctgccacgccacgctttgactgtgtcccctcttgtgactggaaagcttaaaaacttgtgctgcgcaattgtttcttgtactgttcagtcctgccaaataaggcaagaagactcaactctgagaagctgtggcctagtcaggttgggtggcttgcccaaagtcattcacttcacaacaaggaaaagtagttgttggcccaggttcttaactccctcatgctgtgtcctctgcttaagagtagaagtatatttcttgtctcctgtactctggcttgtcgcgttatgggaagtctggcccctccaaattttcagggtacaaaatgcaaactgtaaatcatgccctacccatggaggtgcctccagaaatctgatgacgttggctgaatttgagagcacgcatctgtactgtaggatgccgaggtatttcagtgtgctgaacttccttagactttcatttctggtttaggaagtgcttagctttgcttcttagcccagagggaccatcaataatcaacaaatcctgccttgtgcttgttccaaaggagtgcaagctttcaaactgaactttatatactctgggcctctcttccctagggattttatggccagtgtttcggtgcagagtttgtggaagtgataaaagactctactccagtggacaaaaccaagttggatcctaacaaggtatggaaaaaatatatactaaaagtggttatcacactctaccctaacagtagaaaatggcagacccagaggtctggactcccccagtccttcaaatgtgaccatgttttagtttgttttttaggggggaggggtgcacacacatgtatgaatggagtgtatgcatgtgtgtgtgcaggctcactcttccatacatgcccacatgtgcaagctggagtttagcaccaagtggttttctctatcatgaaccacctcatcttttctacccgggtttccctgtttggccagtaaacagcagatctaccgtccctgccacctccttccccagcactggggtacacatatgcagtggcttttatctgggtactggggagctgagcaagggttctcattttacccacccctcccatttaggtttttttttgagaaggttcttgctgttagttcagcctggctacacaccagctctgtgtttatataagtcatgtctcgtcatccccctacagccctgaggattcggtttggttgtttgtgttttacaagataagaaagttgaggctcagaaaggttggaccactttccaagatgacgctaatggcggagcggctaccccaacatgggatctgattccacccacggtcttcttcattactatggctcattagtgcatttctgtaaaatgtttaaactttctacttaaagcatgtttttaaattccaacttctgagccaggagagatcgttcagcagttaagagcacttactgctcttccaaaggacccaagtttggttccctgcacccacatcagtctgtaattctggctgcatgacatcaactccctctctggcctccagaaatgcatgcacacttgtggcaaatacaaatagtgtatgaatgcgaatgtgtgggcctgtgcgtgtgtgcatgtgtgtgtgtgtctaaaaaaatgcagcagcttctggctggccatacttagtggccctgttctttaagctgcaggcattccttctagccatatgcaggattgctatggtattagagaaaggggggggggcctggggctttgttgttctctgttccataccaagggtccatcccaggctgagatggtatgctgtgcgattctgatgctgacagctcacatcatagcatatgatttcacaagtttaagactgcccttgtttcaaacatgagcctcagctggggcccctacacctctcacaccacccatgcttctagccggctacaaatgtaggagttcttaccacacccttgggttagataattctgcaggataagtgcacggactgaaaacagtaccacagttccgactgcagttgtacagtaatggatcccagagtgcaaggtcaggaggaaggccgatctctgtgccctctccatgtgggtccctgaattctgtcttccaggattgcagaaagatgatcctgatagggagggattggccacatacaagtttttctacatttgtccggacactcacttgagagacattccccagctgaggccggagagcagtcatgattagcattggacagaaaagtttggagtccttggaagataaggctggctgtgtgcccagtggtcagaacagctcaagaagccttcccagcatcagggcctttcccctcttttagaattcccaggctaggctgtgagtttggaatgagaatcaacccagaatcacacccagatttcattatcctaaagcgtgatttacactgtgaggtcagtgaaccgcccttcctcctcctgggtgggtgtcccaccctgaaccattgctcatttccattcttttccttgtgtttttaaagaactcttcattgttaacaagcacccctccctcccccatctcgtgtgtattcgtgtgtaatttgctgatttgtcgtttcatgtgttttgatatatacacataaccagtacttgacagtcaaggtataaaacaaccctgttcctctgaaaggtttctctagtctcttttgccaccactccctcatctcattcagcccttagtggtcaccaagctgagctgtagtccccgatctgtgtagacttgcctttctggaggtgtgtatgtggcacatgtagccctttgaagctggcttcttctactcagcccaccccatccatgactcaccgagttgaaatcgctccttcctttccatgctaagtagtattcattgtgttgatgtgccacactttgcttagtgtctccactggagggacacttggacattttcttgtcatttattatgaacaaggttactctttctcagtggttttcaaccatcctaatgctgtgacccttgaatacagttcatgttgtgatgaccccaaccatggaactacttcacagctgtaatcttgcttctcttatgaatcgtgatgtgaaagggactctccacaccccgagtggggtcatgaccctcaggttgagaatggtggctctcaagcatggcctcgtgtggctgattattaccctccgatcctcttggtgttatgtgactctcctgaggagtctgcttctgttcacctcatatcgtgagggcagcaacagatcagagaaagggttctcttcaagtctcactcggtgaatcgatgagtttattggtgttattgacagagcatgggtactcaaaatcccctgcaccaccatgaaaccctctatgtgatttatgggcagctactccaccaaagaaactcctcccctcagcaagtggagaaaagtggggaccggcagaggaaggatgggtgtcgctgcagcagcctacccgcttccttcatgcgggtgatcacatctgctctccttcaaagcagcaataagcacaccaagctaaggaacgccccacacaagtactgcgtacgcgtgtggcagtggggctcgtgtgggggcggcatttggctgcatgaggagccttggcgtacagagcagccatgcgccctgcattcctggtgctcatttgaacattccagccgctccgtcctagcaaacacttgctattatacatgtcctcagtctaagcagttgcacgacctagagggcgggccctcattagggcaactgagtaaaggaaggtctgcgtccttgggacagcagttggatgacttcgctgtgctagaggggccgcagctggacccggctcttctcttaagcctgttcccttccacagcctcggggcttttctttgcctgggttggagaggaaacagggcagattctgaactccctcccgcctcgcttgcggtgttaggcattggtggttttccagactggaagggagtgtcgggttctgtcccagcgtgcctttccaaagcgccctgcatctctttggctgactggctcacctcttcccgtctcctcacctcttccttcccccaggcctacattcagatcacttttgtggagccttactttgatgaatatgagatgaaagaccgggtgacctacttcgagaagaatttcaacctccggaggttcatgtacaccacccccttcaccctggaggggagaccccggggcgagcttcatgagcaacaccgcagaaacaccgtgctcaccaccatgcacgccttcccctacatcaagaccaggatccgagtcagccagaaagaggaggtaatgcgccccgcccgtgggaaatggccactttcgggaagagggagcctggatgatccccaagacccacacgccagctctacctcatgagactgaagagaaccctgaaaaaaagaaaagcaaagaatggaggggaaaagaagggctggacacagtggcgtgtgcctttagtcccagcactgaggattcaggggcaggtggatggctgcgaattcaaggccagccttatctacataacaagttccaagccaaccatggctacacagtaagacacaacaaacacgcggcagccctgggagtccatgctcatgatcccagtactccagaggctgaggcaggagcatcttgagtttgagagcatcctgggtggcatagcaagtctaaggcaacccaaactatttagggagatacagctcagcagtagggctgttgtctggcctgtacaaagatatccttaaaatattgtctcgaggctattctctcactctcatggggccaagggatctcacgcagtgagttacacctttcaaaacagtgttaaatatttagttccttaaagttatttatatagcatagtttacatatttaatcactgtgtttccattttaattataagcttatataagaggtctgtatagtattcccttcatgttattaggttttatatccatagaatcaaccaaccttgaattggcatattgaagggaaattttacataaatacagaatttgtatgaatttttccccttaaaaaataaaaacttcacacacatgtaagctctcctgaacagataaagaggaatctgttaccctgcatggtggcacacaccctaatcccagcatttgaaaggcagaggcaggtagttctctgagttcaagccaccctagtctacagagttccaggacatccaagggttacatagagaaaccctgtctcaaacaaacaaacaaacaaacaaacaaacaagaatatagtaaagccgttgtctgtgcagtctttgcagcccattgggtgtgaaggatttgctgttacactctagagtgtttcctaaatgcttggtcgaaacaactgagggggcagagtcattgtagctcagttttcaaggtctcatccattgtggtgaagaaggcatagcagagctgttcagtgcacaccatagtaaccaggaagcagacaataaggcttacaggaggggaccaaggaaaagtacagccccaagggcttatgctcccatggacctgtaccactgaactaggcccatcttctatacttcatgagagatccatccactggttatgttaaaggtttctgttggaaaccacaccctagtgcatgaatctgtgggtatacttcataatcaaacatctacgtatcctcagatttcagtacagctggagagaaaagttcccagaaccatctttccagggagtatgaatgcctgtatttaaattttatattttatgcagtgtttttctcgagtattaggtactagattcagagcctcgtgcttactgcaatacttcacctatggcctgtaggtgtttcagacactgttgtattgcagagagggaatcaaacaggcagccccctgacctggtactccgtgtgggaagggcacgattgcagccagcacatcagcctgctcctggccccaggttcttccagtgccggtgcaggaggcacatggctctaacctcttaataaaaatgttggcaagaaagaccttatgtactttggaagactttaacccactttaatagagtcttaccaagaagatctctcaaacctcagaattatgcatagcaccaaccttccattttctccttaaaatccctacgtgttaactcatataccacctctttatcctggactgcagccttctctgattctggcttgactcatcccaacctggcactttctttcttgtatagaccacacccagttctcggtctgctctctgtgatgcagaatgaggccttaaaaaatccttaggaactgatgtgtgagcggatggcttctgcaccttgatgagcctagccccaaacttctttttacagttgtcttgtgcatacctaatatgacaggaatttttatagcaactcactttcatgacatctcgcccaggcatccagcttgatcttcatagcaacagctctctttccatacccttacttcatcagtttatccgttgttcattaagccaacaactagaacaggcccaatcaagtcagtgaacatgtgaaggacttgcaaccatccagtccatggggcaggagctgcatgggctgagctggctggagagcagccatctagaccgctgctgagtgatgtagcttcctcagagaggaggagtcacagagcctgccctggagactgtccatagaaaggtgttgggaaggcatctagtatgctgcttactgtttcaagacttttaaacactaagacattctaggcacaatacagagatacattgtttatgaaagtgtccttataactatatgcaatgcccccagagaactactccaggtttcccattgctccagctatgtaacaaagtggcccagactggatggcataaataacagaaatgtattgtcttggcagttctcgaggctgggaagctcaagttcagggaattggcaggttggttccttgtgagggctgagggagaatctgtcccaggcctgcctcaagccttgtcagaggacatcttctccttgtgtctgctcatctcatctgtgctatatacaagctgtgccctcatttcctcatctcttaaagataccaattatgtgaattaggtctgccctaataaacccagtttaacttgactaccttctgagctcctggaggttaggcctttaaatgtgaatgggggggggggggttgatccatcacattcaggaaggacccaaccccaaaccagaacttagcaccctcttctcaaggtgtcaccatcacagtgagctggaaaaggcacaaaagatgtgaaagcttacgtgatgatgggaaagaaaatcatggcggccatactttccccttgtaatctgagtaacttgttcaatactaggaaaaacaaaacaaaacaaccaacctagccatgtagaaagaagttgggctttagatatagaaataattatgacggctgagcatggtggcacacacctttaatcccagcactcaggaggcagaggcaggcagatttctgagttcaaggccagcctgttttacaaagtgagttccaggacagccaaggctacacagagaaaccctgtctcgaaaaacaaaaataataataataataattatgaccaaatttgtaccttagtacttaatacattttgtgttagtcttataaattccccttttacgataaagtgaaaagggcaggcagttgtttaaaggagaaactcatacacagatgcggaacatgtaggtactcaagaaacatgaaggccatctctgtgtgacctgttcagattatttcaaagtaccctgaaagtcattccttagctgctgcgtcaaatccaggtagcctccctgtcagagctccaggtttgccagggactgtaagggaggccatggcctcactctgcggttgtcttctgttcagttcgttttgactccgattgaggttgccattgaagatatgaagaagaagaccctgcagttagccgtggccactcaccaggagccccctgatgcaaagatgctgcaaatggtactgcagggctctgtaggagccactgtaaatcaggtaagctgggctcactaatggcagcttggttagggcttgtttgtttacgtggtctctactcttaggaggtgatgaggaatcagtctacatgcaatcttcctttttaaaaaaatcccagaaaggagaagactgtatttaaggagtaccattgtctcaaagtctccatttggaaccagatctggcaatatgacccaggactagagtcttgttgcagagagctgacttgtgtccaggataggtagctatatgcagagctttggacaaattctaagaatgtgtatgtagagataagaaaaggcaggcctaggccatctatctcctcggttaggtaccaggtattcccaacatagcaagtaccttgccaacaggattgatctgtgactggcttctcaggccactttgacaagattagtgtttgcattcctgtcataaccatcacacacaagttcagcatagaactaagactgcctctgatggagagacatataagcctagttagtgctttctgtctagtgggccccttgatgttggctcttcacaccaccacacccaaaaacccataaccattgtccttcccagccaacgccttctctatctgaggatcccctgcagaaattctaagtctgttcaacttagggggaatcaaaggtagcaaacaggaggcctgtgaattctctgcttcaaatcatggtttacataaaatgattcatccactggggccaccagataagcagatagactcggacagatagaggtagccttcgctttagaggagccgctcacagtagcagcctttgctgccgtcacattcattaccttgtggtatgaagggaaagctgtagggttagcattggattgagaagatgcccttaggccagtccgtagtctcctaaaactcttggtcctcctcgggaatccgtttcctgagaaattcaagacctccctaggctttttgttttagtgaaacaagctacaaaattaaatgttcagaagtaaggagccctccccacattctctctctcccaagtcatttcattttcattccaactccatctcctgtttcccctccctccatcagggaccactggaggtggcccaagtgttcttggctgaaattccagctgacccaaagctctaccgacatcacaacaagctgaggttgtgcttcaaggagttcataatgcggtaagaagggaggtggtggacactggagcgtgactgcatgggggcaccgctcagtactggagtgtttgcccaacacgcaagaggccctaggtgccatccccaccactacaaaaacaaatagaatcatatcccaggtaccacccagagctactggctcattgactctggtttaagaaccctgctagatgcttatgatgcacacacacacactgaaccttaaggtccagggcagtagaccaatggtgcttgtactaccactgagaaactaacacttcttgtgtaggctgcttcatggctgccatggcactgggcctcacagtcgtgtcgtaagaccgatatcgtcatcttcgccttacacacgagccatgggaggtttggggatgggagatgactttactgacggccacgcagccagttggcagccgggctgagttgcagcaggtcttctggttcttggccatccctgcttctgtctgggctggtagtcactgacacacttaagtcaaagctgtttgtatttatactatgtaggtttgcaaattatccagtgatttcctttagaagcctaaaactaggaaaggttctaaaactgggctttggcaaagatgacacatacctgggcaaggccagcctcatctgtcctactgacttcttctgtgcgactggtcttaagggcagctgcttcagcctagacagaaaatggctctgtagtcagagccttgtgattcccgagacacagatagttacctcaggtctccagtggggcctgaaagaaaaacgtgatgagatggggtatgacgccacttcacttataagagaagaaaatgtcagaagtgtgtgtaccaattgcctttacttccagaaccttggtgcagtgaccgaggacaggaatagtcttgcagggtgggcagggagaaaggaaactaaaagttagtttgcccaatttagggtcagcccactagagggctgctgtcgggtgaaactagagatagagtctcatcacaagctttccggagaaatgcccaactttgctgtgtgagaacacttctccctgcagtgaagtgcaggtatttggaaatgggtatatacaataggtggcatctagtaatgttggtatacttggtttcctttttttatagcaattctgctataagaggcatcattttctttactacatagtactttattggcttttgttctctctctctctctctctctctctctctctctctctctctctctctctctctctctcctttctgaaacagtgtcccactatgtacctctgaccagcctgggaattaggtctgggcattcctgtgaccatggtgacaggatgaagtgtcacattactgagtagcaacagagtgcagcatgtactgagaactcttaagaacattccagatacaggaatccacacatcagaaaggccaggtccattgtgagctaggataggctttatggaaaactatcacctactatttgtctcgaatattcaggtggaagaagaaagatgatggtgagagggagccatgactgtcaggaagatggcgtggatgtaagactcactcaggaatgccagctctgctgtctcatggaagtccatgccagctggagagcaggccaggctgggaaatatcagagccacattagctctgggtagaatatcacagaataggaagtttgctgagggaaggggcacttttagggttcacaccaactccctctgctggatcactcaatcccaaccaagactccacgtagatgaagtgccctagcccatccctattgggtgtgttctaggtctctggaaactacagtccgaggacaagggcaggtggttatctcgcttcttaagaggatcctttaacagagttactgtcttagggtttctattcctgcacaaacatcatgaccaagaagcaagttggggaggaaagggtttattcagcttacacttccacattgctgttcatcatcagaggaagtcaggactggaactcaagcaggacaggaacttggaggcaggagctgatgcagaggccatggagggatgctgcttactggcttgcttctcctggcttgctcagcttgctttcttacacaacccagaactaccagcccagggatggcactgcccacagtgggctctcccacccttgatcactaattgagaaaatgcctcacagctggatctcatggaggcatttccttaagggaggctcctttctctgtgatagctccagcttgtgtcaacttgacacacaaaaccagcgggtacagatattcaaagtcaaagtccttaagaaatgctattctcagcaagttgaggcaggagacttactgtgagtttggggtcagctctgatgggcatagtgtgctccagaccagcctgggaaacatagcaaaactctctagcagcaatgctctgggtaaaccagatggcacttatcaaaccaaatgcagactgatggttcagtaagcatggagtagggcccaagactctggcttttgttagtttgtttgggttgggttggggttgtttgtttgtttgtttgtttgggggttttgttttgtgtttaaggcagggtttcactttgtagtcccaggttggccttctcccttgaatccccctgtctcagcatcctaagtgctagaatgacaagtgtcggctaccatgcctggatccagattgtgcagtactgtgcgatgcgtccttgtgctggggccgtgggagcggcggcctttgggcagaagctgctgcttccgggcctcctgtttatacttctcccccagctcccccaaccttaactcttcaagtcacccctttggtcttcctcccttcaaaaagacaagtatgttcacacagccattctgaaccaaccctcggtccatgccagcttgccacaatccagcataccctctgtaccaccggtgtggagaggtgacatcctaaggcaggaaggccatagataaaacaatgcttccagccactaccacatccacgacgacacgaccacagttaacctcccctctcttcatcccagacaggccaaaaatggcagttcatcaaactccttttttttttttttttggtttttcgagacagggtttctctgtgtagccctggctgtcctggaactcactctttagaccaggctggtctcgaactcagaaatctgccttcctctgcctcccgagtgctggaattaaaggcgtgcgccaccacgcatggccgaactacgtttaaaaggagtgtaaggatttttaagttcccacaaagcagtggctgaagcccccctctcccacctgcttgctgctcccaagtccgatgaggaagctgccactgtttgagaccatagacaacagagtggcccactgctgagactccttttcactgggctctgtctcctcagcttcccagcagactggtagatatcccagggctcaaaggagacccagccagccttcccgcaaggacagctctgttgacacagccctggccaagtctgtagtggcttctcctgcaccaggacagcggctttggactcagctgtagcctggcatgcagcagtcagcactcctagactcttagcactcttctgatggctgccaagagaggacaaggccttctctgccttttcctaagaggaaatgcctgaaaggttcataaccgcagatggacaagtgtctcctccctcctctcccagactcactagaccgtcagaggcactgcagtcggttctgtgttttccctcacttaatctgattgctctcactcctgcagagacttggggcttgggaaatagctcagtggataagagcatgcattgtgcaagtctgaggacttgagttcaaatccctgctacctacatataaaccttaatgtcgctgtgcatgcaccggtgacccccagcagaggggtggatggggcaatggctggggtttgctggtcaccagcctagttccagggtcagttaagagaccctgcctcaagaaaaatcctgatgtcttcctctggcttctacacatgtacctgcgtccacatgtgcatacacaccacacatacaaatacagttaacaaattataagtattaagtgatggggggcggtgctgaaaaaatggttctgcagttaaatgtgtgtactgttttttttcaaggaacctgagtttggctcccagcacccatactaggtagctcacaactgcctgccactctaaggacacactttcttagggggcacagccacccacacagggagcaattcctgcctacgatgagcttatgagagaaacggcaaaccaaacttacagattaaaaaaaaaatgaggaaagtgctgagttagaaagagagagaagccataagccagatgtgacatgtgcctttaatcctagcactggggaggcagggcaaagcctgctccagagagatccaacccctctggcctcttcaggcacttgcagtcatgtgtatacataagcaagcacacacgtgtacacacacacacacacacacaattaacaatagatgattttaaaaggttaagtaaaataaaataaaaataatttttagaaggattcagtgtcttaaattttattttttgtatttgaattagagacagccatattacaggcacttttacaagactgtgtggctactgtcccagcagtgtatatgctggctcagaggcagacagtaatgtgtgacgttggtggtttttaagagggtttgggtcagtgtgcatggtgtctgtggaaacagatctggatgctttccggggagacagtgttaaatgacagaggcttctaggaatcaggttaacaagggatgacccctgtgaccttgggtctcctgtaacacactaaggatagctaagttaagggcgctaagaagaaatttgagccaggtgtagctgcttatgcacacacacacacacacacacacacacactttctcatgggcatgagcacagctctttggccttcctcatctcacctgtagtgactaacaagaaaactataaccttggtgtagtgatcgtctctgcccttcctctgcctcaccccaccccactcccttggacacactctctgtccccgtgccctgtgcctggaggaacagttatggagggaggatttctggagctgaggctgactcagaacagctgcagttatttggtcccgaaagtcagagaaccacgggggttgaggatttgtctgtgttaacactagagttccgccacagtggggcagtcagccctgttttcagttctggacagttatccttaccattcttattgtttccccagtggtgtctaccttaacctgtctgttgatttctcttcgtctctcctctgttgctgtttgatgagttgttctgatacaggggttctctggccacccttactcgttttgttttgttttgttttttttcttactttgttctgtaatctctaattccttttctcttggggggttggggagcaggggtctccctgtgtagacctgcctgcctctccctccccagtgctaggattaaagacacatgccacacccagcttacagcttctctctctctctctctctctctctctctctctctctctctctctcacccagcactttcctcattttttaaatctgtaagtttgggcttgtcatttctctcacaaactcaccttaggcaggaatcaccctcctgtgggtggccatgcaccctaacaaagtgagggggggactttctataggttcctgatgccttaggacttcttagtttaatgccttgtgtggtacgagcttcagattgcaatcctgcaaaataactttttcattaaaggccttgtgctcatagcaagtttgtattccacctcttggggcagcatttttctaagcccatttgcccaagtaagttagctttcttcaaggctctaagctgaatgcccgggctttagagagaaccccacagttctgactctgacgcagggcctaacagtctgtgtcttgaaagctctatgggggatctgataatccatcagggttgaaaacactcttagtggggctgtagtgatggctcagtgggtaagtacacttgctgcacagacataaggacctgagttcagatcccagcactcctgtaacaagcaggatatggtcccacaccttcccataatcccagcgaggaggaaaggggagactgaaagattggtatctctaaggtttgctggactgccacggcaaaaatcataagccccaggcttagcaagagaccttgctcaaagagataaggcagatgtaatagaggggcctaccccatgtcctcctttaatctgtgagtactattacaggcacatgcatatatgttcacacacacacatttatatatatactagagtttgtggttctaaactttacatcgtggtgaacagaaaaacctgctaggagtacaggtttatttggctcacggtttctgggatttcagtctatgaccaagtggatccagcctgcaagaaggcagagcagtatggttggaagcttgctttccaggaagctgttcatctcacagtggccagatgatgatgaggctgcagacaagatgtactcatctcaaggactccttccccgttttgtcccaagtgcctatcagactaggaccctatcaaaggactagtctgtgaatgagttccagagcctcatgacgcaatcacatccccagtcaatccccatccagctgacagccggtgcttcgtcagcactgtgccttagggagacacttagacaagaagcagacttactgtgactgttttccagtcactaaagcacaaacactgaggacctgcaaccgcctctctctccctcagatgcggagaggccgtggagaagaacaggcgactcatcaccgcagagcagcgggagtaccagcaggagctgaagaagaactacaacaagctgagagacagcctcaggcccatgattgagcggaaaatcccagagctctacaagcccatattcagagttgacagtcagaagaggtaaggaggggccagtgtagcctcttcctgggcatcagagatcatgggggcaccacaaatccagcttgctcggctgctcatgcacaaagcagacagcccagggtggactggggctggagtccagcctccagccagtctgtggtctgcattcagtccaaacctttccctgaactcaccaagccccttcttgttggccttgtgccagcgaattcccaagtccatccagtgtagctggtgtgtgtgtagatgtgtagggggctggaggggcaggggtgaacaacaggaatgggtctcaggtcttcttttatttactaagttccccaggaccaatagctttctggttcataattttctcccaaccgtctctttaaaacagcagtctctttaaaaggctaaccaatccttctgttctctctctctctctctctctccttaatttcagggactctttccacagatctagtttcaggaaatgtgaaacccagttgtcacagggcagctgaaaaaagccacctttgccggtgacgactggggccccactacctggaaggactcgctggtacgtccacagcagccacccaagactgactccacagtccctgcccagccagtgctctggaaacttggggggtctatgaccacagaatgatacccaagtgtattgtggactatcttgaccatgtcaggggttggggtggggtgggtaaatcaggggataattgtatttattaaagtatttttcacagtgctgtagaaggaaggcctaagctgtttctgctgagtggcttggctggtcacaggcctcccagaaagtgacttcttctgacctatgtttgaattcctaagataaactcaaattgtggacagaagagtggaacactgtccagcaacctattccgagtgaatttcactcatccctttggtgagaagaaaagataaaactccagaagagtgaaccattttccaatatatctgtgagaaaaagtcttacaggaaatagatggagcgctccacacctctcctgagctgccggactatgtgccgtctagttattgctgcattgttgcttctgttaagctgagtgagtccacctctacgcaggggacagttgtacgagacagacagtccaggtcgcccggccacacagcactgacagcacatgccccagagcgggagcagttctcctaggacatcttgccggttccctgtacacttgctctcactgcctcctttttctccgggataaggtcatttttctacaagacattcatttcagaacattgtgtcctctgtgtgctacagggatatatgctttggattgtttttacagtgaacttggaagagggaaagaaacctatggtttgagaattaaattatatattttcatacaactcatgaccttacctaatgctaaagacagaataagaatgataagcaagtggggtgacaatgcacgcctttagtcccagcactcagaagacagagacaggtggatctctgagtttaaggccagcctggtctacagagcgagttccaggacagccagattacacaatgagaccatgtctcataaataaataaataaataaataaacaaacaaataaataaataaataaataaattgcaaaatgcttccctgtgccactgctgtttgtgactttgacaactcaaagtgctgtgaagcttcagagaccctggtaggactggccttagtcaagcagtgccctccagagtggccctagtgcaatgtcctaatccttctggttggaacagagttctcagttgtcagtactgaaatgttcacacataccattgggcatgagtgaccttattctgaaggaagatgttggaaaaaataaatggcttgctggctgcacttatttaaac

1. Process for generating a non-human mammal having a genetic predisposition towards type 1 diabetes mellitus, characterized by introducing into the mammal a mutation within the Dock homology region-2 (DHR2) region of the dedicator of cytokinesis 8 (Dock8) encoding gene, the mutation encoding an amino acid altering the binding of the DHR2 region of Dock8 to Cdc42.

2. Process according to claim 1, characterized in that the mutation is within the exon 44, preferably in the section encoding the β4 region of the DHR2 region.

3. Process according claim 1, characterized in that the mutation encodes an amino acid exchange in the Dock8 encoding gene corresponding to Q1864E of SEQ ID NO: 1 or Q1865E of SEQ ID NO: 12.

4. Process according to claim 1, characterized in that the mammal is a mouse having the MHC haplotype H²G⁷ and/or carrying a mutation in the von Willebrand factor A2 (Vwa2) encoding gene encoding an amino acid exchange in amino acid position 159 of the amino acid sequence encoded by exon 11 of the Vwa2 (SEQ ID NO: 17 or SEQ ID NO: 18) encoding gene.

5. Polynucleic acid molecule comprising the section of the gene encoding the DHR2 region of the Dock8 protein, characterized by comprising a mutation within the section encoding the DHR2 region, the mutation encoding an amino acid alteration reducing binding of the DHR2 region of Dock8 to Cdc42.

6. Polynucleic acid molecule according to claim 5, characterized in that the mutation is within the exon 44, preferably in the section encoding the 04 region of the DHR2 region.

7. Polynucleic acid molecule according to claim 5, characterized in that the mutation encodes the amino acid exchange Q1864E in a Dock8 protein according to SEQ ID NO: 1, or the mutation encodes the amino acid exchange Q1865E in a Dock8 protein according to SEQ ID NO: 12.

8. Non-human mammal having a genetic mutation predisposing for type 1 diabetes, characterized by having a mutation in the section encoding the DHR2 region of the Dock8 protein encoding gene, the mutation encoding an amino acid alteration reducing binding of the DHR2 region of Dock8 to Cdc42.

9. Non-human mammal according to claim 8, characterized in that the mutation is within the exon 44, preferably in the β4 section of the DHR2 region.

10. Non-human mammal according to claim 8, characterized in that the mammal is a rat and the mutation encodes the amino acid exchange Q1864E in a Dock8 protein according to SEQ ID NO: 1, or that the mammal is a mouse and the mutation encodes the amino acid exchange Q1865E in a Dock8 protein according to SEQ ID NO: 12.

11. Non-human mammal according to claim 8, characterized in that the mammal is a rat and has a mutation encoding a Willebrand factor A2 (Vwa2) protein having an amino acid in amino acid position 159 of exon 11 (SEQ ID NO: 17 or SEQ ID NO: 18) other than arginine (R).

12. Process for analysis of the activity of a compound by administration of the compound to a non-human mammal, characterized in that the non-human mammal is according to claim 8 which is homozygous for a mutation in the section encoding the DHR2 region of the Dock8 protein encoding gene.

13. Process according to claim 12, characterized in that the mammal is a mouse having the MHC haplotype H²G⁷ or the mammal is a rat having the MHC haplotype RT1-B/D^{u}.

14. Process for analysis of a sample obtained from a human or from a non-human mammal for genetic predisposition towards type 1 diabetes mellitus, characterized by determining the presence of mutations within the DHR2 region of the DOCK8 encoding gene, the mutation encoding an amino acid alteration reducing binding of the DHR2 region of DOCK8 to Cdc42.

15. Process according to claim 14, characterized in that the mutation encodes an amino acid at position 1864 in the rat gene encoding Dock8 of SEQ ID NO: 10 or in the human gene encoding DOCK8 of SEQ ID NO: 8 or the mutation encodes an amino acid at position 1865 in the mouse gene encoding Dock8 of SEQ ID NO: 11, and/or comprising determining the presence of a mutation encoding an amino acid at position 681 in the rat gene encoding the von Willebrand factor A2 (Vwa2) of SEQ ID NO: 20 or in the mouse gene encoding the von Willebrand factor A2 (Vwa2) of SEQ ID NO: 21 or the mutation encodes an amino acid at position 682 of the human gene encoding the von Willebrand factor A2 (Vwa2) of SEQ ID NO: 22.
